(19) United States
(12) Patent Application Publication
(10) Pub. No.: US 2010/0234292 A1
(43) Pub. Date: Sep. 16, 2010

(54) METHODS OF ASSESSING A PROPENSITY OF CLINICAL OUTCOME FOR A FEMALE MAMMAL SUFFERING FROM BREAST CANCER

(75) Inventors: Francois Bertucci, Carnoux-en-Provence (FR); Daniel Birnbaum, Marseille (FR); Patrice Viens, Marseille (FR); Vincent Fert, Marseille (FR); Fabienne Hermitte, La Ciotat (FR); Stephane Debono, Marseille (FR); Stephane Deraco, Saint-Orens-de-Gameville (FR); Nathalie Borie, Clermont-Ferrand (FR); Fanny Piette, Limelette (BE)

Correspondence Address: ARENT FOX LLP, 1050 CONNECTICUT AVENUE, N.W., SUITE 400, WASHINGTON, DC, 20036, US

(73) Assignees: IPSOGEN, Marseille (FR); INSERM - INSTITUT NATIONAL DE LA SANTE ET DE LA RE CHECHE MEDICALE, Paris Cedex 13 (FR); INSTITUT PAOLI-CALMETTES, Marseille (FR)

(21) Appl. No.: 12/596,143

(22) PCT Filed: Apr. 16, 2008
(86) PCT No.: PCT/IB08/02334

§ 371 Date: May 21, 2010

Related U.S. Application Data
(60) Provisional application No. 60/923,690, filed on Apr. 16, 2007.

(51) Int. Cl. C12Q 1/68; A61K 38/16; A61K 38/22; A61K 38/02; A61P 35/00

(52) U.S. Cl. 514/12; 435/6; 514/2

(57) ABSTRACT

The present invention relates to a method of assessing a propensity of clinical outcome for a female mammal suffering from breast cancer in view of the expression of specific nucleic acid sequences in a biological sample.

### FIELD OF THE INVENTION

[0001] The present invention relates to methods of assessing a propensity of the clinical outcome of a female mammal suffering from breast cancer, preferably after said female mammal has been treated with chemotherapy, for example anthracycline-based chemotherapy.

### BACKGROUND

[0002] Breast cancer is the most common nonskin malignancy in women and the second leading cause of female cancer mortality (FEAR et al., IEEE Potentials, vol. 22 (1), p: 12-18, 2003).

[0003] Worldwide, breast cancer is the most common cancer in women. It is estimated than in the year 2000, there were 350.000 new breast cancer cases in Europe, while the number of deaths from breast cancer was estimated at 130.000. Breast cancer is responsible for 26.5% of all new cancer cases among women in Europe, and 17.5% of cancer deaths. The highest incidence rates for the year 2000 were in Western Europe, with France in third position (42.000 new cases and 12.000 deaths). Despite these high rates of incidence and mortality, the survival of women diagnosed with breast cancer increased in Europe and in France since the end of the 1970s. This improvement is probably in relation with early diagnosis and screening programs and with adjuvant systemic therapy.

[0004] Adjuvant chemotherapy (CT) for breast cancer has undergone major changes over the past two decades. Results from the published update of the overview analysis by the Early Breast Cancer Trialists' Collaborative group indicated that administration of adjuvant CT significantly reduced the risk of recurrence by 23.5% and the risk of death by 15.3%. According to the same overview, the 10-year recurrence-free survival for node-positive patients treated with adjuvant CT was 47.6% for patients younger than 50 years and 43.6% for those 50 to 69 years of age. The 10-year overall survival (OS) was 53.8% and 48.6% respectively. This overview analysis also demonstrated that, as compared with standard combination of cyclophosphamide, methotrexate and 5FU (CMF), regimens that contained anthracyclins reduced the annual risk of recurrence of breast cancer by 12% and the annual risk of death by 11%. Such regimens are significantly (2p=0.0001 for recurrence, 2p<0.00001 for breast cancer mortality) more effective than CMF.

[0005] The most commonly used anthracycline-based adjuvant CT regimen in USA consists of four cycles of doxorubicin plus cyclophosphamide (AC) administrated every 21 days. Six cycles of FAC (cyclophosphamide, doxorubicin, and fluorouracil) every 3 weeks were also accepted as appropriate adjuvant regimen. Since epirubicin is less cardiotoxic than doxorubicin at an equimolar dose (recommended cumulative doses of doxorubicin and epirubicin are 550 mg/m² and 1.000 mg/m², respectively), several groups introduced epirubicin. A National Cancer Institute of Canada study showed that six cycles of cyclophosphamide, epirubicin, fluorouracil (CEF) were superior to six cycles of CMF. The Groupe Français d'Etudes Adjuvantes (GFEA; The French Adjuvant Trial Group) has studied epirubicin in the treatment of breast cancer for several years. The FEC regimen (fluorouracil, epirubicin, cyclophosphamide) has been evaluated in the trial setting lymph node-positive patients. Six cycles of adjuvant FEC 50 (epirubicin 50 mg/m²) are better than 3 cycles. Subsequently a trial in patients less than 65 years of age, with node-positive operable breast cancer, compared FEC 50 versus FEC 100 (epirubicin 100 mg/m²). Six cycles of FEC 100 was associated with improved relapse rates and better survival. Thus, 6 cycles of FEC every three weeks were generally accepted a few years ago in France as appropriate and “standard” adjuvant regimens for early breast cancer.

[0006] Recently, taxanes have emerged as potent agents for the adjuvant treatment of breast cancer. Studies involving more than 20.000 patients have been reported or are ongoing. Recent published adjuvant trials with taxanes (paclitaxel, docetaxel) in node-positive breast cancer have demonstrated an additional benefit (as compared with regimen without taxanes), ranging from 2 to 7% in absolute difference in disease-free survival (DFS) or overall survival (OS) at 5 years. Two trials showed the benefit of incorporating sequentially 4 courses of paclitaxel after 4 cycles of AC: CALGB 9344 and NSABP B-28. Two trials showed the benefit of incorporating docetaxel: BCIRG 01 study, which compared the FAC regimen (6 cycles) to the TAC regimen (docetaxel, doxorubicin, and fluorouracil, 6 cycles), and PACS 01 study. The PACS 01 study (1.999 patients included) was promoted by the French Federation of Anti-Cancer Centers (FNCLCC). It compared the FEC 100 regimen (6 cycles) to a sequential regimen, 3 cycles of FEC100 followed by 3 cycles of docetaxel administered at the dose of 100 mg/m² every 3 weeks in node-positive patients. At a median follow-up of 60 months, adjuvant CT with 3 cycles of FEC100 followed by 3 cycles of docetaxel improved recurrence-free survival (reduction in the hazard rate of recurrence, 17%, p=0.04) and OS (reduction in the hazard rate of death, 23% p=0.005) (13). The 5-year DFS are 78.3% (3 FEC100-3 docetaxel arm) vs 73.2% (6 FEC100 arm) and the 5-year OS are 90.7 vs 86.7 respectively. In comparison with the BCIRG study, the incidence of febrile neutropenia, infection and cardiac dysfunction is very low especially in the sequential arm. As a consequence of these trials, the combination of anthracyclin and taxane has become the new standard of adjuvant CT for node-positive breast cancer. Several other trials promoted by the FNCLCC (PACS) investigated the optimal scheme of combination eprubicin-docetaxel: the PACS 04 study compared the FEC 100 regimen (6 cycles) to the combination epirubicin 75 mg/m²+docetaxel 75 mg/m² every 3 weeks in node-positive patients. Follow-up is ongoing with 3.015 patients included (end of inclusions in August 2004). The PACS 06 compared FEC 100×3 cycles every 2 weeks followed by docetaxel 100 mg/m^{2×3} cycles every 2 weeks, in association with G-CSF, with either a 2-week or a 4-week interval between FEC and docetaxel. The primary endpoint was to define the rate of patients with any toxicity requiring dose reduction or treatment delay by more than one week over the 6 courses. As May 2005, the recruitment was stopped after 74 inclusions with the following conclusion, FEC 100×3 cycles every 2 weeks followed by docetaxel 100 mg/m^{2×3} cycles every 2 weeks, with a 2-week interval between FEC and docetaxel is not feasible due to an excess of skin/hand-foot syndrome severe toxicities.

[0007] Currently, adjuvant CT in early breast cancer is indicated according classical prognostic factors such the axillary lymph node status, the pathological size and grading of tumour, the hormonal receptor expression, and age of patients. These factors remain insufficient for reflecting the whole heterogeneity of disease, and none of them has been validated for selecting the optimal regimen of CT, resulting in the delivery of a combination of anthracyclin-taxane to all node-positive patients. However, recent studies have shown that in sub-groups of patients the addition of taxanes did not provide benefit as compared to FAC or FEC and that these classical regimens without taxanes might provide long survival in certain patients. Altogether with the potential toxicity and cost of the combination of anthracyclin-taxane, as well as the ongoing introduction/development of new drugs in adjuvant regimens (CT such as capecitabine, targeted therapy such as trastuzumab, hormone therapy such as anti-aromatases, diphosphonates), these data call for the identification of parameters predictive of clinical outcome (prognostic and/or predictive of response to CT) after given regimen of adjuvant CT.

[0008] A lot of research, mainly retrospective, has been performed to find predictive biological factors of adjuvant CT effectiveness, but, presently, there is still no individual admitted factor. The current prognostic factors evaluate only poorly the heterogeneous clinical behavior of disease. In consequence, many N− patients are subjected to unnecessary anthracycline-based adjuvant CT, and all N+ patients receive regimens based on anthracyclines and taxanes (Piccart et al. The Breast 14:439-445, 2005). However, taxanes are not yet universally accepted as standard treatment (Colozza et al. Oncologist 11:111-125, 2006). Recent randomized studies (Buzdar et al. Clin Cancer Res 8:1073-1079, 2002; Henderson et al. J Clin Oncol 21:976-983, 2003; Mamounas et al. J Clin Oncol 23:3686-3696, 2005; Martin et al. N Engl J Med 352:2302-2313, 2005; Roche et al. J Clin Oncol 24:5664-5671, 2006) have shown that the addition of taxanes provides a significant but small benefit (3 to 7%) in 5-year survival. This suggests that a majority of patients do not benefit from the anthracycline-taxane combination. The availability of new drugs in adjuvant setting and the heterogeneity of breast cancer render necessary the tailoring of treatment without systematically associating all drugs. This challenge supposes to better assess the metastatic risk after CT. No biological factor predictive of anthracycline-based adjuvant CT efficacy (Hayes, The Breast 14:493-499, 2005) has yet been validated and introduced in routine use.

[0009] A predictive factor will be of a tremendous interest to select patients who benefit or who do not benefit from a specific regimen of adjuvant CT. Breast cancer is a complex genetic disease characterized by the accumulation of multiple molecular alterations. Pathological and clinical factors are insufficient to capture the complex cascade of events which drive the heterogeneous clinical behaviour of tumours.

[0010] High-throughput molecular technologies provide novel tools to tackle this complexity. In particular, DNA microarrays allow the simultaneous and quantitative analysis of the mRNA expression levels of thousands of genes in a single assay. The first research results are promising; comprehensive gene expression profiles of breast tumours are revealing new sub-groups of tumour in groups a priori identical, but with different outcome.

[0011] Several retrospective studies confirm the prognostic potential of DNA microarrays in breast cancer (Bertucci et al. Omics 10:429-443, 2006). Most studies focused on survival without any adjuvant systemic therapy (van de Vijver et al. N Engl J Med 347:1999-2009, 2002; van 't Veer et al. Nature 415:530-536, 2002; Wang et al. Lancet 365:671-679, 2005; Foekens et al. J Clin Oncol 24:1665-1671, 2006) after adjuvant HT (Ma et al. Cancer Cell 5:607-616, 2004; Paik et al. N Engl J Med 351:2817-2826, 2004; Oh et al. J Clin Oncol 24:1656-1664, 2006) and after neo-adjuvant CT (Sorlie et al. Proc Natl Acad Sci USA 98:10869-10874, 2001; Sorlie et al. Proc Natl Acad Sci USA 100:8418-8423, 2003). A few studies directly analyzed the response to primary CT (Ayers et al. J Clin Oncol 22:2284-2293, 2004; Bertucci et al. Cancer Res 64:8558-8565, 2004; Chang et al. Lancet 362:362-369, 2003; Hannemann et al. J Clin Oncol. 23:3331-3342, 2005). Only few data with small (Bertucci al. Lancet 360:173-174; discussion 174, 2002; Bertucci et al. Hum Mol Genet 9:2981-2991, 2000) or heterogeneous series (Pawitan et al. Breast Cancer Res 7:R953-964, 2005) are available regarding outcome after adjuvant CT. In all these studies, the prognostic and/or predictive multigenic signatures appeared more performing than individual molecular and pathoclinical parameters.

[0012] There is a need of adapting adjuvant CT in patients that are candidate to CT. The ongoing introduction of new drugs in adjuvant setting—in general associated to a low and heterogeneous benefit and a morbid and financial cost—necessitates refining the assessment of the metastatic risk after a given CT regimen and the decision regarding what CT regimen to use.

[0013] After exhausting testing we have identified gene marker sets that predict clinical outcome after CT, and methods of use thereof. This represents a step towards molecular tailoring by guiding patients towards the most beneficial CT regimen. This would allow moving away from the “one shoe fits all” strategy used in oncology for many years and from the ongoing therapeutic escalation.

### SUMMARY OF THE INVENTION

[0014] The invention relates to a method for assessing the clinical outcome of a female mammal suffering from breast cancer, comprising the step of:

[0015] a) generating a metagene adjusted value underER by comparing the expression level, in a biological sample from said female mammal and in a control, of at least 10 nucleic acid sequences selected in the group comprising or consisting of: SEQ ID No:374 (nm_{—}000212), SEQ ID No:1027 (nm_{—}007365), SEQ ID No:598 (nm_{—}000636), SEQ ID No:717 (nm_{—}024598), SEQ ID No:573 (nm_{—}001527), SEQ ID No:83 (nm_{—}015065), SEQ ID No:12 (nm_{—}002964), SEQ ID No:405 (nm_{—}000852), SEQ ID No:856 (nm_{—}005564), SEQ ID No:384 (nm_{—}002466), SEQ ID No:167 (nm_{—}002627), SEQ ID No:51 (nm_{—}198433), SEQ ID No:999 (nm_{—}145290), SEQ ID No:979 (nm_{—}004414), SEQ ID No:2 (nm_{—}005245), SEQ ID No:98 (nm_{—}016267), SEQ ID No:751 (nm_{—}002423), SEQ ID No:696 (nm_{—}001428), SEQ ID No:1050 (BC034638), SEQ ID No:488 (nm_{—}002979), SEQ ID No:262 (nm_{—}005194), SEQ ID No:1020 (nm_{—}000359), SEQ ID No:1106 (BC015969), SEQ ID No:952 (nm_{—}003878), SEQ ID No:675 (nm_{—}001512), SEQ ID No:289 (nm_{—}020179), SEQ ID No:553 (nm_{—}004701), SEQ ID No:579 (nm_{—}001814), SEQ ID No:760 (nm_{—}005746), SEQ ID No:805 (nm_{—}014624), SEQ ID No:361 (nm_{—}002906), SEQ ID No:448 (nm_{—}198569), SEQ ID No:170 (nm_{—}002428), SEQ ID No:878 (nm_{—}002774), SEQ ID No:1117, SEQ ID No:612 (nm_{—}032515), SEQ ID No:540 (nm_{—}003159), SEQ ID No:823 (nm_{—}000100), SEQ ID No:131 (nm_{—}145280), SEQ ID No:705 (nm_{—}005596), SEQ ID No:31 (nm_{—}005558), and SEQ ID No:199 (nm_{—}024323), fragments, derivatives or complementary sequences thereof.

[0016] Preferably, at least 20 nucleic acid sequences selected in said group, and more preferably at least 25 nucleic acid sequences selected in said group.

[0017] In one embodiment, said metagene adjusted value underER is generated by comparing the expression level, in a biological sample from said female mammal and in a control, of the 20 nucleic acid sequences selected in the group consisting of: SEQ ID No:374 (nm_{—}000212); SEQ ID No:1027 (nm_{—}007365); SEQ ID No:598 (nm_{—}000636); SEQ ID No:573 (nm_{—}001527); SEQ ID No:83 (nm_{—}015065); SEQ ID No:12 (nm_{—}002964); SEQ ID No:405 (nm_{—}000852); SEQ ID No:856 (nm_{—}005564); SEQ ID No:167 (nm_{—}002627); SEQ ID No:51 (nm_{—}198433); SEQ ID No:98 (nm_{—}016267); SEQ ID No:751 (nm_{—}002423); SEQ ID No:696 (nm_{—}001428); SEQ ID No:262 (nm_{—}005194); SEQ ID No:1020 (nm_{—}000359); SEQ ID No:579 (nm_{—}001814); SEQ ID No:760 (nm_{—}005746); SEQ ID No:805 (nm_{—}014624); SEQ ID No:878 (nm_{—}002774); and SEQ ID No:612 (nm_{—}032515), fragments, derivatives or complementary sequences thereof.

[0018] In another embodiment, said metagene adjusted value underER is generated by comparing the expression level, in a biological sample from said female mammal and in a control, of the 27 nucleic acid sequences selected in the group consisting of: SEQ ID No:374 (nm_{—}000212); SEQ ID No:1027 (nm_{—}007365); SEQ ID No:598 (nm_{—}000636); SEQ ID No:573 (nm_{—}001527); SEQ ID No:83 (nm_{—}015065); SEQ ID No:12 (nm_{—}002964); SEQ ID No:405 (nm_{—}000852); SEQ ID No:856 (nm_{—}005564); SEQ ID No:167 (nm_{—}002627); SEQ ID No:51 (nm_{—}198433); SEQ ID No:98 (nm_{—}016267); SEQ ID No:751 (nm_{—}002423); SEQ ID No:696 (nm_{—}001428); SEQ ID No:262 (nm_{—}005194); SEQ ID No:1020 (nm_{—}000359); SEQ ID No:579 (nm_{—}001814); SEQ ID No:760 (nm_{—}005746); SEQ ID No:805 (nm_{—}014624); SEQ ID No:878 (nm_{—}002774); SEQ ID No:612 (nm_{—}032515); SEQ ID No:384 (nm_{—}002466); SEQ ID No:2 (nm_{—}005245); SEQ ID No:1050 (BC034638); SEQ ID No:952 (nm_{—}003878); SEQ ID No:361 (nm_{—}002906); SEQ ID No:31 (nm_{—}005558); and SEQ ID No:199 (nm_{—}024323), fragments, derivatives or complementary sequences thereof.

[0019] b) generating a metagene adjusted value underPR by comparing the expression level, in a biological sample from said female mammal and in a control, of at least 6 nucleic acid sequences selected in the group comprising or consisting of: SEQ ID No:598 (nm_{—}000636), SEQ ID No:1122, SEQ ID No:364 (nm_{—}002253), SEQ ID No:387 (nm_{—}006563), SEQ ID No:34 (nm_{—}001229), SEQ ID No:657 (nm_{—}000633), SEQ ID No:384 (nm_{—}002466), SEQ ID No:451 (nm_{—}001110), SEQ ID No:999 (nm_{—}145290), SEQ ID No:1056 (AK126297), SEQ ID No:15 (nm_{—}003243), SEQ ID No:1090 (AK125808), SEQ ID No:1120, SEQ ID No:12 (nm_{—}002964), SEQ ID No:743 (nm_{—}006875), SEQ ID No:414 (nm_{—}000546), SEQ ID No:374 (nm_{—}000212), SEQ ID No:711 (nm_{—}002291), SEQ ID No:663 (nm_{—}006928), SEQ ID No:1102 (AK124587), SEQ ID No:237 (nm_{—}002644), SEQ ID No:60 (nm_{—}022640), SEQ ID No:361 (nm_{—}002906), SEQ ID No:119 (nm_{—}004730) (or SEQ ID No:1109 (NM_{—}002019)), SEQ ID No:167 (nm_{—}002627), SEQ ID No:339 (nm_{—}144970), SEQ ID No:333 (nm_{—}145037), SEQ ID No:83 (nm_{—}015065), SEQ ID No:330 (nm_{—}018291), SEQ ID No:1024 (nm_{—}030666), SEQ ID No:229 (nm_{—}004586), SEQ ID No:925 (nm_{—}005257), SEQ ID No:788 (nm_{—}001005369), SEQ ID No:1104 (AK128524), SEQ ID No:1103 (BX108410), SEQ ID No:66 (nm_{—}000416), SEQ ID No:1030 (nm_{—}024007), SEQ ID No:1119, SEQ ID No:1068 (AK024670), SEQ ID No:241 (nm_{—}000801), SEQ ID No:398 (nm_{—}003084), SEQ ID No:74 (nm_{—}000878), SEQ ID No:1087 (AK074131), SEQ ID No:955 (nm_{—}001986), SEQ ID No:71 (nm_{—}004633), SEQ ID No:1105 (BC072392), SEQ ID No:856 (nm_{—}005564), SEQ ID No:231 (nm_{—}006678), SEQ ID No:593 (nm_{—}001511), SEQ ID No:384 (nm_{—}002466), SEQ ID No:519 (nm_{—}020125), SEQ ID No:579 (nm_{—}001814), SEQ ID No:1039 (nm_{—}006209), SEQ ID No:31 (nm_{—}005558), SEQ ID No:327 (nm_{—}173825), SEQ ID No:573 (nm_{—}001527), SEQ ID No:98 (nm_{—}016267), SEQ ID No:1059 (AK091113), SEQ ID No:886 (nm_{—}000075), SEQ ID No:1032 (nm_{—}005688), SEQ ID No:1091 (XM_{—}378178), SEQ ID No:233 (nm_{—}178155), SEQ ID No:938 (nm_{—}003012), SEQ ID No:264 (nm_{—}152862), SEQ ID No:546 (nm_{—}005874), SEQ ID No:1099 (BC066343) SEQ ID No:1037 (nm_{—}023068), SEQ ID No:550 (nm_{—}004848), SEQ ID No:1027 (nm_{—}007365), SEQ ID No:1005 (nm_{—}014938), SEQ ID No:820 (nm_{—}000593), and SEQ ID No:370 (nm_{—}000106), fragments, derivatives or complementary sequences thereof.

[0020] Preferably, at least 10 nucleic acid sequences selected in said group, as an example at least 20 nucleic acid sequences or at least 30 nucleic acid sequences, and more preferably at least 36 nucleic acid sequences selected in said group.

[0021] In one embodiment, said metagene adjusted value underPR is generated by comparing the expression level, in a biological sample from said female mammal and in a control, of the 6 nucleic acid sequences selected in the group consisting of: SEQ ID No:364 (nm_{—}002253); SEQ ID No:34 (nm_{—}001229); SEQ ID No:657 (nm_{—}000633); SEQ ID No:339 (nm_{—}144970); SEQ ID No:229 (nm_{—}004586); SEQ ID No:1119, fragments, derivatives or complementary sequences thereof.

[0022] In another embodiment, said metagene adjusted value underPR is generated by comparing the expression level, in a biological sample from said female mammal and in a control, of the 36 nucleic acid sequences selected in the group consisting of: SEQ ID No:364 (nm_{—}002253); SEQ ID No:34 (nm_{—}001229); SEQ ID No:657 (nm_{—}000633); SEQ ID No:339 (nm_{—}144970); SEQ ID No:229 (nm_{—}004586); SEQ ID No:1119; SEQ ID No:387 (nm_{—}006563); SEQ ID No:1056 (AK126297); SEQ ID No:15 (nm_{—}003243); SEQ ID No:1120; SEQ ID No:414 (nm_{—}000546); SEQ ID No:374 (nm_{—}000212); SEQ ID No:711 (nm_{—}002291); SEQ ID No:663 (nm_{—}006928); SEQ ID No:237 (nm_{—}002644); SEQ ID No:60 (nm_{—}022640); SEQ ID No:119 (nm_{—}004730); SEQ ID No:330 (nm_{—}018291); SEQ ID No:1024 (nm_{—}030666); SEQ ID No:925 (nm_{—}005257); SEQ ID No:1104 (AK128524); SEQ ID No:1103 (BX108410); SEQ ID No:66 (nm_{—}000416); SEQ ID No:1068 (AK024670); SEQ ID No:374 (nm_{—}000212); SEQ ID No:74 (nm_{—}000878); SEQ ID No:231 (nm_{—}006678); SEQ ID No:593 (nm_{—}001511); SEQ ID No:384 (nm_{—}002466); SEQ ID No:1039 (nm_{—}006209); SEQ ID No:327 (nm_{—}173825); SEQ ID No:886 (nm_{—}000075); SEQ ID No:1032 (nm_{—}005688); SEQ ID No:264 (nm_{—}152862); SEQ ID No:1037 (nm_{—}023068); and SEQ ID No:1005 (nm_{—}014938), fragments, derivatives or complementary sequences thereof.

[0023] c) generating a metagene adjusted value underEGFR by comparing the level, in a biological sample from said female mammal and in a control, of at least 10 nucleic acid sequences selected in the group comprising or consisting of: SEQ ID No:1071 (NM_{—}001033047), SEQ ID No:254 (nm_{—}005581), SEQ ID No:6 (nm_{—}003225), SEQ ID No:883 (nm_{—}000125), SEQ ID No:543 (nm_{—}005080), SEQ ID No:681 (nm_{—}020974), SEQ ID No:63 (nm_{—}001002295), SEQ ID No:212 (nm_{—}024852), SEQ ID No:635 (nm_{—}001002029), SEQ ID No:535 (nm_{—}003226), SEQ ID No:1125, SEQ ID No:109 (nm_{—}000662), SEQ ID No:342 (nm_{—}001846), SEQ ID No:927 (nm_{—}004703), SEQ ID No:1124, SEQ ID No:124 (nm_{—}014899), SEQ ID No:280 (nm_{—}020764) (or SEQ ID No:1110 (nm_{—}024522)), SEQ ID No:297 (nm_{—}016463), SEQ ID No:791 (nm_{—}016835), SEQ ID No:210 (nm_{—}178840), SEQ ID No:827 (nm_{—}152499), SEQ ID No:1064 (nm_{—}000767), SEQ ID No:147 (nm_{—}014675), SEQ ID No:323 (nm_{—}001014443), SEQ ID No:106 (nm_{—}004619), SEQ ID No:181 (nm_{—}000848), SEQ ID No:376 (nm_{—}057158), SEQ ID No:116 (nm_{—}014034), SEQ ID No:252 (nm_{—}000758), SEQ ID No:797 (nm_{—}022131), SEQ ID No:911 (nm_{—}000168), SEQ ID No:720 (nm_{—}004726), SEQ ID No:889 (nm_{—}000561), SEQ ID No:250 (nm_{—}000930), SEQ ID No:179 (nm_{—}004747), SEQ ID No:786 (nm_{—}033388), SEQ ID No:177 (nm_{—}015996), SEQ ID No:1047 (BC012900), SEQ ID No:301 (nm_{—}004326), SEQ ID No:207 (nm_{—}003940), SEQ ID No:936 (nm_{—}003462), SEQ ID No:916 (nm_{—}001453) (or SEQ ID No:1116 (nm_{—}004040)), SEQ ID No:1052 (BX096026), SEQ ID No:159 (nm_{—}000224), SEQ ID No:1096 (AK127274), SEQ ID No:28 (nm_{—}021800), SEQ ID No:1054 (AK123264), SEQ ID No:25 (nm_{—}012391) (or SEQ ID No:1108 (nm_{—}053279)), SEQ ID No:825 (nm_{—}024704), SEQ ID No:145 (nm_{—}017786), SEQ ID No:491 (nm_{—}004374), SEQ ID No:485 (nm_{—}003834), SEQ ID No:1072 (AY007114), SEQ ID No:274 (nm_{—}032108), SEQ ID No:258 (nm_{—}080545), SEQ ID No:292 (nm_{—}014371), SEQ ID No:803 (nm_{—}183047), SEQ ID No:349 (nm_{—}031946), SEQ ID No:1123, SEQ ID No:763 (nm_{—}014585), SEQ ID No:438 (nm_{—}001759), SEQ ID No:94 (nm_{—}014315), SEQ ID No:845 (nm_{—}001089), SEQ ID No:1084 (BX648964), SEQ ID No:734 (nm_{—}025137), SEQ ID No:943 (nm_{—}002141), SEQ ID No:1085 (nm_{—}000720), and SEQ ID No:276 (nm_{—}012202), fragments, derivatives or complementary sequences thereof.

[0024] Preferably, at least 20 nucleic acid sequences selected in said group, as an example at least 24 nucleic acid sequences or at least 30 nucleic acid sequences, and more preferably at least 37 nucleic acid sequences selected in said group.

[0025] In one embodiment, said metagene adjusted value underEGFR is generated by comparing the expression level, in a biological sample from said female mammal and in a control, of the 24 nucleic acid sequences selected in the group consisting of: SEQ ID No:1071 (nm_{—}001033047); SEQ ID No:254 (nm_{—}005581); SEQ ID No:6 (nm_{—}003225); SEQ ID No:883 (nm_{—}000125); SEQ ID No:543 (nm_{—}005080); SEQ ID No:681 (nm_{—}020974); SEQ ID No:63 (nm_{—}001002295); SEQ ID No:212 (nm_{—}024852); SEQ ID No:635 (nm_{—}001002029); SEQ ID No:535 (nm_{—}003226); SEQ ID No:1125); SEQ ID No:1124; SEQ ID No:297 (nm_{—}016463); SEQ ID No:791 (nm_{—}016835); SEQ ID No:827 (nm_{—}152499); SEQ ID No:207 (nm_{—}003940); SEQ ID No:916 (nm_{—}001453) (or SEQ ID No:1116 (nm_{—}004040)); SEQ ID No:1052 (BX096026); SEQ ID No:159 (nm_{—}000224); SEQ ID No:25 (nm_{—}012391) (or SEQ ID No:1108 (nm_{—}053279)); SEQ ID No:845 (nm_{—}001089); and SEQ ID No:1085 (nm_{—}000720), fragments, derivatives or complementary sequences thereof.

[0026] In another embodiment, said metagene adjusted value underEGFR is generated by comparing the expression level, in a biological sample from said female mammal and in a control, of the 37 nucleic acid sequences selected in the group consisting of: SEQ ID No:1071 (nm_{—}001033047); SEQ ID No:254 (nm_{—}005581); SEQ ID No:6 (nm_{—}003225); SEQ ID No:883 (nm_{—}000125); SEQ ID No:543 (nm_{—}005080); SEQ ID No:681 (nm_{—}020974); SEQ ID No:63 (nm_{—}001002295); SEQ ID No:212 (nm_{—}024852); SEQ ID No:635 (nm_{—}001002029); SEQ ID No:535 (nm_{—}003226); SEQ ID No:1125; SEQ ID No:1124; SEQ ID No:297 (nm_{—}016463); SEQ ID No:791 (nm_{—}016835); SEQ ID No:827 (nm_{—}152499); SEQ ID No:207 (nm_{—}003940); SEQ ID No:916 (nm_{—}001453) (or SEQ ID No:1116 (nm_{—}004040)); SEQ ID No:1052 (BX096026); SEQ ID No:159 (nm_{—}000224); SEQ ID No:25 (nm_{—}012391) (or SEQ ID No:1108 (NM_{—}053279)); SEQ ID No:845 (nm_{—}001089); SEQ ID No:1085 (NM_{—}000720); SEQ ID No:109 (nm_{—}000662); SEQ ID No:342 (nm_{—}001846); SEQ ID No:927 (nm_{—}004703); SEQ ID No:280 (nm_{—}020764) (or SEQ ID No:1110 (NM_{—}024522)); SEQ ID No:210 (nm_{—}178840); SEQ ID No:181 (nm_{—}000848); SEQ ID No:116 (nm_{—}014034); SEQ ID No:250 (nm_{—}000930); SEQ ID No:177 (nm_{—}015996); SEQ ID No:825 (nm_{—}024704); SEQ ID No:145 (nm_{—}017786); and SEQ ID No:276 (nm_{—}012202), fragments, derivatives or complementary sequences thereof.

[0027] d) generating a score (S_{C}) from said metagene adjusted values using a mathematical method establishing a relation between the combined metagene values and the clinical outcome of said female mammal.

[0028] In one embodiment, the mathematical method used in step d) comprises a Cox regression analysis (Wright et al., Proc. Natl. Acad. Sci. USA, vol. 100 (17), p. 9991-9996, 2003) or a CART analysis (Breiman et al Classification and Regression Trees, Chapman & Hall 1984).

[0029] In a particular embodiment, the mathematical method is a Cox regression analysis and the score (S_{C}) is generated according to the following formula: S_{C}=a×underER+b×underPR+c×under EGFR, wherein “a” is comprised in the interval [−6.26; +0.49], “b” is comprised in the interval [−2.65; +0.29] and “c” is comprised in the interval [−6.69; +1.65].

[0030] For example the formula is: S_{C}=−2.90279×underER−1.47423×underPR−4.17198×under EGFR.

[0031] The invention further relates to a method for assessing the clinical outcome of a female mammal suffering from breast cancer, comprising the step of:

[0032] a) generating a metagene adjusted value underEGFR by comparing the expression level, in a biological sample from said female mammal and in a control, of at least one nucleic acid sequence selected in the group consisting of: SEQ ID No:1071 (NM_{—}001033047), SEQ ID No:254 (nm_{—}005581), SEQ ID No:6 (nm_{—}003225), SEQ ID No:883 (nm_{—}000125), SEQ ID No:543 (nm_{—}005080), SEQ ID No:681 (nm_{—}020974), SEQ ID No:63 (nm_{—}001002295), SEQ ID No:212 (nm_{—}024852), SEQ ID No:635 (nm_{—}001002029), SEQ ID No:535 (nm_{—}003226), SEQ ID No:1125, SEQ ID No:109 (nm_{—}000662), SEQ ID No:342 (nm_{—}001846), SEQ ID No:927 (nm_{—}004703), SEQ ID No:1124, SEQ ID No:124 (nm_{—}014899), SEQ ID No:280 (nm_{—}020764) (or SEQ ID No:1110 (nm_{—}024522)), SEQ ID No:297 (nm_{—}016463), SEQ ID No:791 (nm_{—}016835), SEQ ID No:210 (nm_{—}178840), SEQ ID No:827 (nm_{—}152499), SEQ ID No:1064 (NM_{—}000767), SEQ ID No:147 (nm_{—}014675), SEQ ID No:323 (nm_{—}001014443), SEQ ID No:106 (nm_{—}004619), SEQ ID No:181 (nm_{—}000848), SEQ ID No:376 (nm_{—}057158), SEQ ID No:116 (nm_{—}014034), SEQ ID No:252 (nm_{—}000758), SEQ ID No:797 (nm_{—}022131), SEQ ID No:911 (nm_{—}000168), SEQ ID No:720 (nm_{—}004726), SEQ ID No:889 (nm_{—}000561), SEQ ID No:250 (nm_{—}000930), SEQ ID No:179 (nm_{—}004747), SEQ ID No:786 (nm_{—}033388), SEQ ID No:177 (nm_{—}015996), SEQ ID No:1047 (BC012900), SEQ ID No:301 (nm_{—}004326), SEQ ID No:207 (nm_{—}003940), SEQ ID No:936 (nm_{—}003462), SEQ ID No:916 (nm_{—}001453) (or SEQ ID No:1116 (NM_{—}004040)), SEQ ID No:1052 (BX096026), SEQ ID No:159 (nm_{—}000224), SEQ ID No:1096 (AK127274), SEQ ID No:28 (nm_{—}021800), SEQ ID No:1054 (AK123264), SEQ ID No:25 (nm_{—}012391) (or SEQ ID No:1108 (nm_{—}053279)), SEQ ID No:825 (nm_{—}024704), SEQ ID No:145 (nm_{—}017786), SEQ ID No:491 (nm_{—}004374), SEQ ID No:485 (nm_{—}003834), SEQ ID No:1072 (AY007114), SEQ ID No:274 (nm_{—}032108), SEQ ID No:258 (nm_{—}080545), SEQ ID No:292 (nm_{—}014371), SEQ ID No:803 (nm_{—}183047), SEQ ID No:349 (nm_{—}031946), SEQ ID No:1123, SEQ ID No:763 (nm_{—}014585), SEQ ID No:438 (nm_{—}001759), SEQ ID No:94 (nm_{—}014315), SEQ ID No:845 (nm_{—}001089), SEQ ID No:1084 (BX648964), SEQ ID No:734 (nm_{—}025137), SEQ ID No:943 (nm_{—}002141), SEQ ID No:1085 (nm_{—}000720), and SEQ ID No:276 (nm_{—}012202), fragments, derivatives or complementary sequences thereof.

[0033] Preferably, said nucleic acid sequence is SEQ ID No:681 (nm_{—}020974), fragments, derivatives or complementary sequences thereof.

[0034] Preferably, at least 10 nucleic acid sequences selected in said group, as an example at least 20 nucleic acid sequences or at least 24 nucleic acid sequences, and more preferably at least 37 nucleic acid sequences selected in said group.

[0035] In one embodiment, said metagene adjusted value underEGFR is generated by comparing the expression level, in a biological sample from said female mammal and in a control, of the 24 nucleic acid sequences selected in the group consisting of: SEQ ID No:1071 (nm_{—}001033047); SEQ ID No:254 (nm_{—}005581); SEQ ID No:6 (nm_{—}003225); SEQ ID No:883 (nm_{—}000125); SEQ ID No:543 (nm_{—}005080); SEQ ID No:681 (nm_{—}020974); SEQ ID No:63 (nm_{—}001002295); SEQ ID No:212 (nm_{—}024852); SEQ ID No:635 (nm_{—}001002029); SEQ ID No:535 (nm_{—}003226); SEQ ID No:1125); SEQ ID No:1124; SEQ ID No:297 (nm_{—}016463); SEQ ID No:791 (nm_{—}016835); SEQ ID No:827 (nm_{—}152499); SEQ ID No:207 (nm_{—}003940); SEQ ID No:916 (nm_{—}001453) (or SEQ ID No:1116 (nm_{—}004040)); SEQ ID No:1052 (BX096026); SEQ ID No:159 (nm_{—}000224); SEQ ID No:25 (nm_{—}012391) (or SEQ ID No:1108 (NM_{—}053279)); SEQ ID No:845 (nm_{—}001089); and SEQ ID No:1085 (NM_{—}000720), fragments, derivatives or complementary sequences thereof.

[0036] In another embodiment, said metagene adjusted value underEGFR is generated by comparing the expression level, in a biological sample from said female mammal and in a control, of the 37 nucleic acid sequences selected in the group consisting of: SEQ ID No:1071 (nm_{—}001033047); SEQ ID No:254 (nm_{—}005581); SEQ ID No:6 (nm_{—}003225); SEQ ID No:883 (nm_{—}000125); SEQ ID No:543 (nm_{—}005080); SEQ ID No:681 (nm_{—}020974); SEQ ID No:63 (nm_{—}001002295); SEQ ID No:212 (nm_{—}024852); SEQ ID No:635 (nm_{—}001002029); SEQ ID No:535 (nm_{—}003226); SEQ ID No:1125; SEQ ID No:1124; SEQ ID No:297 (nm_{—}016463); SEQ ID No:791 (nm_{—}016835); SEQ ID No:827 (nm_{—}152499); SEQ ID No:207 (nm_{—}003940); SEQ ID No:916 (nm_{—}001453) (or SEQ ID No:1116 (nm_{—}004040)); SEQ ID No:1052 (BX096026); SEQ ID No:159 (nm_{—}000224); SEQ ID No:25 (nm_{—}012391) (or SEQ ID No:1108 (NM_{—}053279)); SEQ ID No:845 (nm_{—}001089); SEQ ID No:1085 (NM_{—}000720); SEQ ID No:109 (nm_{—}000662); SEQ ID No:342 (nm_{—}001846); SEQ ID No:927 (nm_{—}004703); SEQ ID No:280 (nm_{—}020764) (or SEQ ID No:1110 (NM_{—}024522)); SEQ ID No:210 (nm_{—}178840); SEQ ID No:181 (nm_{—}000848); SEQ ID No:116 (nm_{—}014034); SEQ ID No:250 (nm_{—}000930); SEQ ID No:177 (nm_{—}015996); SEQ ID No:825 (nm_{—}024704); SEQ ID No:145 (nm_{—}017786); and SEQ ID No:276 (nm_{—}012202), fragments, derivatives or complementary sequences thereof.

[0037] b) generating a metagene adjusted value overEGFR by comparing the expression level, in a biological sample from said female mammal and in a control, of at least one nucleic acid sequences selected in the group consisting of SEQ ID No:405 (nm_{—}000852), SEQ ID No:374 (nm_{—}000212), SEQ ID No:1122, SEQ ID No:598 (nm_{—}000636), SEQ ID No:262 (nm_{—}005194), SEQ ID No:1099 (BC066343), SEQ ID No:696 (nm_{—}001428), SEQ ID No:1059 (AK091113), SEQ ID No:751 (nm_{—}002423), SEQ ID No:1121, SEQ ID No:286 (nm_{—}002417), SEQ ID No:244 (nm_{—}199002), SEQ ID No:18 (nm_{—}001880), SEQ ID No:121 (nm_{—}014553), SEQ ID No:1107 (BC073775), SEQ ID No:103 (nm_{—}003619), SEQ ID No:1118, SEQ ID No:42 (nm_{—}000757), and SEQ ID No:1067 (AK123784), fragments, derivatives or complementary sequences thereof.

[0038] Preferably, said nucleic acid sequence is SEQ ID No: 1107 (BC073775) or SEQ ID No: 1099 (BC066343), fragments, derivatives or complementary sequences thereof.

[0039] More preferably, at least 5 nucleic acid sequences selected in said group, as an example at least 10 nucleic acid sequences, and more preferably at least 12 nucleic acid sequences selected in said group.

[0040] In one embodiment, said metagene adjusted value overEGFR is generated by comparing the expression level, in a biological sample from said female mammal and in a control, of the 5 nucleic acid sequences selected in the group consisting of: SEQ ID No:1122; SEQ ID No:598 (nm_{—}000636); SEQ ID No:696 (nm_{—}001428); SEQ ID No:1059 (AK091113); and SEQ ID No:121 (nm_{—}014553), fragments, derivatives or complementary sequences thereof.

[0041] In another embodiment, said metagene adjusted value overEGFR is generated by comparing the expression level, in a biological sample from said female mammal and in a control, of the 12 nucleic acid sequences selected in the group consisting of: SEQ ID No:1122; SEQ ID No:598 (nm_{—}000636); SEQ ID No:696 (nm_{—}001428); SEQ ID No:1059 (AK091113); SEQ ID No:121 (nm_{—}014553); SEQ ID No:262 (nm_{—}005194); SEQ ID No:1099 (BC066343); SEQ ID No:751 (nm_{—}002423); SEQ ID No:1121; SEQ ID No:286 (nm_{—}002417); SEQ ID No:103 (nm_{—}003619); and SEQ ID No:1118, fragments, derivatives or complementary sequences thereof.

[0042] c) generating a score (S_{C}) from said metagene adjusted values using a mathematical method establishing a relation between the combined metagene values and the clinical outcome of said female mammal.

[0043] In one embodiment, the mathematical method used in step c) comprises a Cox regression analysis or a CART analysis.

[0044] In another embodiment, the mathematical method is a Cox regression and the score (S_{C}) to the following formula: S_{C}=a×overEGFR+b×underEGFR, wherein “a” is comprised in the interval [−1.85; +0.81] and “b” is comprised in the interval [−3.86; +0.70]

[0045] For example the formula is: S_{C}=−1.33×over EGFR×2.28×under EGFR.

[0046] The invention further relates to a method of assessing the clinical outcome of a female mammal suffering from breast cancer, comprising the steps of:

[0047] a) generating a metagene adjusted value underER by comparing the expression level, in a biological sample from said female mammal and in a control, of at least two genes, e.g. by using nucleic acid sequences selected in the group of Affymetrix® Probe Sets, of table IX or XII, preferably table XII (described below),

[0048] b) generating said metagene adjusted value underPR by comparing the expression level, in a biological sample from said female mammal and in a control, of at least two genes, e.g. by using nucleic acid sequences selected in the group of Affymetrix® Probe Sets, of table X or XIII, preferably table XIII (described below),

[0049] c) generating said metagene adjusted value underEGFR by comparing the expression level, in a biological sample from said female mammal and in a control, of at least two genes, e.g. by using the nucleic acid sequences selected in the group of Affymetrix® Probe Sets, of table XI or XIV, preferably table XIV (described below),

[0050] d) generating a score (S_{C}) from said metagene adjusted values using a mathematical method establishing a relation between the combined metagene values and the clinical outcome of said female mammal.

[0051] In one embodiment, the mathematical method used in step d) comprises a Cox regression or CART analysis.

[0052] In another embodiment, the mathematical method used in step d) is a Cox regression and the score (S_{C}) is generated according to the following formula: S_{C}=a×underER+b×underPR+c×under EGFR, wherein “a” is comprised in the interval [−6.26; +0.49], “b” is comprised in the interval [−2.65; +0.29] and “c” is comprised in the interval [−6.69; +1.65].

[0053] For example, the formula is: S_{C}=−2.90279×underER−1.47423×underPR−4.17198×under EGFR.

[0054] Preferably, the comparing of expression level at each step a), b) and c) is performed with at least 5, preferably 10, preferably all of said genes or nucleic acid sequences of each respective group.

[0055] In various embodiments, said methods may comprise the first step of quantifying in a biological sample from said female mammal the expression level of said nucleic acids sequences.

[0056] In other various embodiments, these methods can comprise the step e) of comparing said score (S_{C}) from the biological sample with a baseline or a score (S_{C}) from a control sample.

[0057] In other various embodiments, said biological sample is a breast tumor sample. By “sample” is meant a cell or a tissue.

[0058] In other various embodiments, said methods further comprise a step of taking at least one biological sample from said female mammal.

[0059] In another embodiment, said methods comprise a step of administrating a pharmaceutical treatment, preferably a chemotherapy treatment to a female mammal, for optimizing the clinical outcome of said female mammal in response to said treatment. The pharmaceutical treatment may comprise the use of one or more taxane compounds, e.g., docetaxel or paclitaxel. This treatment may be administered if the female mammal has not responded to a previous anti-cancer treatment, e.g., a treatment comprising the use of one or more anthracyclin compound, e.g., epirubicin, doxorubicin, pirarubicin, idarubicin, zorubicin or aclarubicin, preferably epirubicin.

[0060] In a further aspect, the methods according to the invention may be used for identifying a female mammal that has not responded to a previous anti-cancer treatment, e.g., a treatment comprising the use of one or more anthracyclin compound, e.g., epirubicin, doxorubicin, pirarubicin, idarubicin, zorubicin or aclarubicin, preferably epirubicin.

[0061] In other various embodiments, a comparison of or analysis of data may involve a statistical computer mediated analysis. Also, said methods may optionally further involve generating a printed report.

[0062] The invention further relates to a computer program comprising instructions for performing said methods.

[0063] Finally, the invention relates to a recording medium for recording said computer program.

### DETAILED DESCRIPTION

[0064] Unless otherwise noted, technical terms are used according to conventional usage.

[0065] In order to facilitate review of the various embodiment of the invention, the following explanation of specific terms is provided:

[0066] Mammals corresponds to animals such as humans, mice, rats, guinea pigs, monkeys, cats, dogs, pigs, horses, or cows, preferably to humans, and most preferably to women;

[0067] Biological sample: any biological material, such as a cell, a tissue sample, or a biopsy from breast cancer.

[0068] A “Metagene” as used herein corresponds to a group of genes for which expression variation (but not necessarily expression level) across tumors is correlated. A metagene can be simply calculated by one of skill in the art according to the method as described in the examples.

[0069] A “Control” as used herein corresponds to one or more biological samples from a cell, a tissue sample or a biopsy from breast. Said control may be obtained from the same female mammal than the one to be tested or from another female mammal, preferably from the same specie, or from a population of females mammal, preferably from the same specie, that may be the same or different from the test female mammal or subject. Said control may correspond to a biological sample from a cell, a cell line, a tissue sample or a biopsy from breast cancer. Preferably, the expression of EGFR, RE, PR and/or KI-67 has been established for this biological sample, by IHC (ImmunoHistoChemistry) FISH (Fluorescence In Situ Hybridization) or Quantitative PCR, for example.

[0070] In silico research: Literally referring to “in computer” systems, in silico research involves methods to test biological models, drugs, and other interventions using computer models rather than laboratory (in vitro) and animal (in vivo) experiments. In silico methods can involve analyzing an existing database, for instance a database that includes one or more records that include quantitative analysis of nucleic acid sequence expression. Analysis of such databases may include mining, parsing, selecting, identifying, sorting, or filtering of the data in the database. Data in the database can also be subjected to a clustering algorithm, discrimination algorithm, difference test, correlation, regression algorithm or other statistical modeling algorithm.

[0071] Using in silico research, drug treatment can be selected, tested and validated, and experimental strategies can be assessed. In silico systems complement laboratory-based research, yet increase productivity and efficiency by minimizing the need for in vitro and in vivo laboratory experiments.

[0072] In certain embodiments provided herein, in silico systems are used. In particular, this disclosure provides in silico methods for assessing a condition related to the clinical outcome of a female mammal suffering from breast cancer. Such methods involve assessing data in a database. The data in the database usually includes a quantity of nucleic acids from a biological sample from one or more individuals.

[0073] Quantitative data as discussed herein include molar quantitative data or relative data (variation of expression compared to control) for individual nucleic acid sequences, or subsets of nucleic acid sequences. Quantitative aspects of nucleic acids samples may be provided and/or improved by including one or more quantitative internal standards during the analysis, for instance one control nucleic acid sequence. Internal standards described herein enable true quantification of each nucleic acid sequence expression.

[0074] Truly quantitative data can be integrated from multiple sources (whether it is work from different labs, samples from different subjects, or merely samples processed on different days) into a single seamless database, regardless of the number of nucleic acid sequences measured in each discrete, individual analysis.

[0075] In any of the provided methods, a comparison of or an analysis involves a statistical or computer-mediated analysis.

[0076] The mathematical model (or method) for establishing a relation between the combined metagene adjusted values is realized on a population of mammal females showing the same ethnic and the same breast cancer characteristics than the female mammal to be tested.

[0077] The metagene coefficients (a, b, c) in the formulas used to calculate the scores (S_{C}) may vary according to the used tumor samples database consisting of mammal females showing the same ethnic and the same characteristics. A skilled person may calculate these coefficients by using a so-called Cox regression as described in Wright et al. (Proc. Natl. Acad. Sci. USA, vol. 100 (17), p. 9991-9996, 2003)

[0078] Optionally, in some of the provided embodiments, the methods further involve comparing the score (S_{C}) from the female mammal to the score (S_{C}) from another female mammal, preferably from the same specie, or a compiled score (S_{C}) from a population of females mammal, preferably from the same specie, that may be the same or different from the test female mammal or subject.

[0079] In specific examples of such methods, the control is a baseline corresponding to a score (S_{C}) established from a population of females mammal.

[0080] The baseline is simply determined by one of skill in the art in view of the protocol described in the examples. An optimal baseline is obtained by using score distribution separating tumors into two groups of most significant different outcome.

[0081] As an example (described below), the inventors have established that a woman having a score (S_{C}) of more than 0.136 have at least a double propensity of poor clinical outcome than a woman with a score (S_{C}) of less than 0.0393.

[0082] Any of the provided method can further involve generating a printed report, for instance a report of some or all the data, of some or all the conclusions drawn from the data, or of a score or comparison between the results of a subject or individual and other individuals or a control or baseline.

[0083] There are many ways to collect quantitative or relative data on nucleic acids sequences, and the analytical methodology does not affect the utility of nucleic acids sequences expression in assessing the clinical outcome of a female mammal suffering from breast cancer. Methods for determining quantities of nucleic acids expression in a biological sample are well known from one of skill in the art. As an example of such methods, one can cite northern blot, cDNA array, oligo arrays or quantitative Reverse Transcription-PCR.

[0084] Preferably said methodology is cDNA arrays or oligo arrays, which allows the quantitative study of numerous candidate genes mRNA expression levels.

[0085] DNA arrays consist of large numbers of DNA molecules spotted in a systematic order on a solid support or substrate such as a nylon membrane, glass slide, glass beads or a silicon chip. Depending on the size of each DNA spot on the array, DNA arrays can be categorized as microarrays (each DNA spot has a diameter less than 250 microns) and macroarrays (spot diameter is grater than 300 microns). When the solid substrate used is small in size, arrays are also referred to as DNA chips. Depending on the spotting technique used, the number of spots on a glass microarray can range from hundreds to thousands.

[0086] Typically, a method of monitoring gene expression by DNA array involves the following steps:

[0087] a) obtaining a polynucleotide sample from a subject; and

[0088] b) reacting the sample polynucleotide obtained in step (a) with a probe immobilized on a solid support wherein said probe consist of polynucleotides having the nucleic acids sequence as previously described, fragments, derivative or complementary sequence thereof.

[0089] c) detecting the reaction product of step (b).

[0090] In the present invention, the term “polynucleotide” refers to a polymer of RNA or DNA that is single- or double-stranded, optionally containing synthetic, non-natural or altered nucleotide bases. A polynucleotide in the form of a polymer of DNA may be comprised of one or more segments of cDNA, genomic DNA or synthetic DNA.

[0091] In the present invention, the term “fragment” refers to a sequence of nucleic acids that allows a specific hybridization under stringent conditions, as an example more than 10 nucleotides, preferably more than 15 nucleotides, and most preferably more than 25 nucleotides, as an example more than 50 nucleotides or more than 100 nucleotides.

[0092] In the present invention, the term “derivative” refers to a sequence having more than 80% identity with an identified nucleic acid sequence, preferably more than 90% identity, as an example more than 95% identity, and most particularly more than 99% identity.

[0093] In the present invention, the term “immobilized on a support” means bound directly or indirectly thereto including attachment by covalent binding, hydrogen bonding, ionic interaction, hydrophobic interaction or otherwise.

[0094] The polynucleotide sample isolated from the subject and obtained at step (a) is RNA, preferably mRNA. Said polynucleotide sample isolated from the patient can also correspond to cDNA obtained by reverse transcription of the mRNA, or a product of ligation after specific hybridization of specific probes to mRNA or cDNA.

[0095] Preferably, the polynucleotide sample obtained at step (a) is labeled before its reaction at step (b) with the probe immobilized on a solid support. Such labeling is well known from one of skill in the art and includes, but is not limited to, radioactive, colorimetric, enzymatic, molecular amplification, bioluminescent, electrochemical or fluorescent labeling.

[0096] Advantageously, the reaction product of step (c) is quantified by further comparison of said reaction product to a control sample.

[0097] Detection preferably involves calculating/quantifying a relative expression (transcription) level for each nucleic acids sequence.

[0098] Then, the determination of the relative expression level for each nucleic acid sequences previously described enables to assess the clinical outcome of the subject—i.e. female mammal—suffering from breast cancer by the method of the invention.

[0099] The method of assessing the clinical outcome of a female mammal suffering from breast cancer can further involve a step of taking a biological sample, preferably breast cancer tissue or cells from a female mammal. Such methods of sampling are well known of one of skill in the art, and as an example, one can cite surgery.

[0100] The provided method may also correspond to an in vitro method, which does not include such a step of sampling.

[0101] Also provided are methods to determine if a pharmaceutical treatment, especially chemotherapy treatment, influences the clinical outcome of a female mammal suffering from breast cancer, which methods involve quantifying said nucleic acids sequences expression in a biological sample from a female mammal and determining the score (S_{C}) for said female mammal.

[0102] Further embodiments are methods to assess or identify a therapeutic or pharmaceutical agent for its potential effectiveness, efficacy or side effects relating to the clinical outcome, which methods involve quantifying said nucleic acids sequences in a biological sample from a female mammal suffering from breast cancer and determining the score (S_{C}) for said female mammal.

[0103] Also provided herein are methods of assessing a change in the propensity of clinical outcome from a female mammal suffering from breast cancer, wherein the methods involve taking at least two biological samples from the female mammal, one of which is taken before and one after an event. In various specific embodiments, the event involves passage of time (e.g., minutes, hours, days, weeks, months, or years), treatment with a therapeutic agent (or putative or potential therapeutic agent), treatment with a pharmaceutical agent (or putative or potential pharmaceutical agent).

[0104] One specific provided embodiment is a method of determining whether or to what extent a condition influences the clinical outcome of a female mammal suffering from breast cancer. This method involves subjecting a subject to the condition, taking a biological sample from the subject, analyzing the biological sample to produce a score (S_{C}) for said subject, and comparing said score (S_{C}) for the subject with a control. From this comparison, conclusions are drawn about whether or to what extent the condition influences the clinical outcome of female mammal suffering from breast cancer based on differences or similarities between the test score (S_{C}) and the control. As contemplated for this embodiment, a condition to which the subject is subjected can include but is not limited to application of a pharmaceutical or therapeutic agent or candidate agent.

[0105] Subject: a female mammal.

[0106] In specific examples of such methods, the nucleic acids sequences expression profile is a pre-condition score (S_{C}) from the subject or a compiled score (S_{C}) assembled from a plurality of individual score (S_{C}). In other examples, the control score (S_{C}) is a control or a baseline established from previously described control score (S_{C}).

[0107] Pharmaceutical treatment: any agent treatment, regimen, or dosage, such the administration of a protein, a peptide (e.g., hormone), other organic molecule or inorganic molecule or compound, or combination thereof, that has or should have beneficial effects on clinical outcome when properly administrated to a subject, preferably said agents are used in chemotherapy.

[0108] Unless otherwise explained, all technical and scientific terms used herein have the same meaning as commonly understood by one of ordinary skill in the art to which this invention belongs. Although methods and materials similar or equivalent to those described herein can be used in the practice or testing of the present invention, suitable methods and materials are described below. All publications, patent applications, patents, and other references mentioned herein are incorporated by reference in their entirety. In case of conflict, the present specification, including explanations of terms, will control. In addition, the materials, methods, and examples are illustrative only and not intended to be limiting.

[0109] In various embodiments, the provided methods further comprise the step of selecting the pharmaceutical treatment that improves the clinical outcome of a female mammal suffering from breast cancer.

[0110] The present invention will be understood more clearly on reading the description of the experimental studies performed in the context of the research carried out by the applicant, which should not be interpreted as being limiting in nature.

### Example 1

### Identification of Significant Metagenes Combination

### 1) Goals:

[0111] While it is now possible to assess patients' responses to drugs with respect to their genomic profile, the standard adjuvant chemotherapy (anthracyclines and taxanes) for non metastatic breast cancer may not be systematically appropriate: according to their genomic profile, women may rather benefit from a treatment based on anthracyclines alone without taxane.

[0112] The primary objective was to identify a gene set, which discriminate two groups of patients with different clinical outcome based on gene expression. This goal was reached by: defining the gene expression profiles, using 9.000-genes microarrays, of 323 tumours obtained from patients treated with adjuvant anthracycline-based CT without taxanes (identification set), grouping individual genes in metagenes and identifying metagenes closely correlated with the biological status of ER, PR, HER2/Neu, MIB/KI67, EGFR status of the sample as determined by the mean of independent methods such as Immunohistochemistry or FISH. Then we combined these metagenes using a Cox proportional hazard ratio analysis to separate patients according to clinical outcome. This latter step providing a model consisting of a score expressed as a linear combination such as Score=Σβᵢ.xᵢ where βᵢ.is a fixed parameter and xᵢ is the value of the metagene.

[0113] The secondary objective was to prospectively validate the Cox model and its metagene component for predicting clinical outcome in an independent cohort of patients (validation set). This goal was reached by defining the gene expression profiles of 164 tumours, using the same technology, obtained from patients treated with adjuvant anthracycline-based CT without taxanes in the context of a multicentric clinical trial.

### 2) Patients:

[0114] We profiled a multicentric and retrospective series of 504 early breast cancers (Institut Paoli Calmettes, Centre Léon Bérard, Institut Bergonié and tumours from clinicals trials PACS01 and PEGASE01) treated with adjuvant anthracycline-based and non taxane-based CT. Clinical and pathological criteria for each patient are summarized in the following table and correspond to the identification and the validation sets.

[0115] Global population demography:

| Age | median (min-max) | 50 | (11-90) |
|---|---|---|---|
| menopausal | Y | 210 | (41.8%) |
| | N | 292 | (58.2%) |
| Tumour size | pT1 | 105 | (21%) |
| | pT2 | 317 | (63.5%) |
| | pT3 | 77 | (15.4%) |
| N (Node) | N− | 67 | (13.3%) |
| | N+ | 437 | (86.7%) |
| Node category | N1 (N = 0) | 67 | (13.3%) |
| | N2 (N = 1 to 3) | 248 | (49.2%) |
| | N3 (N > 3) | 189 | (37.5%) |
| grade SBR | I | 66 | (13.4%) |
| | II | 221 | (45%) |
| | III | 204 | (41.5%) |
| RE (10%) | RE− | 150 | (31%) |
| (Estrogen Receptor) | RE+ | 334 | (69%) |
| RP (10%) | RP− | 199 | (41.5%) |
| (Progesterone Receptor) | RP+ | 280 | (58.5%) |
| RH (10%) | RH− | 115 | (23.8%) |
| (Hormone Receptor; RE | RH+ | 369 | (76.2%) |
| and/or RP) | | | |
| Her2/neu | 0-1-2 | 308 | (85.1%) |
| | 3 | 54 | (14.9%) |
| Hormonotherapy | N | 212 | (45.3%) |
| | Y | 256 | (54.7%) |
| Follow-up | median [IC95] | 71 mois [68-73] | |
| Metastasis | N | 364 | (72.2%) |
| | Y | 140 | (27.8%) |
| 5 years MFS (Metastasis | MFS [IC95] | 73.52 | [69.55-77.72] |
| Free Survival) | | | |
| Deaths from breast | N | 412 | (81.7%) |
| cancer | Y | 92 | (18.3%) |
| Specific Survival at 5 | SS [IC95] | 84.87 | [81.56-88.31] |
| years | | | |

[0116] Identification Set demography (IPC, Lyon, Total):

| Age | median | 52 | | 48 | | 51 | |
|---|---|---|---|---|---|---|---|
| menopausal | Y | 110 | (52%) | 67 | (61%) | 177 | (55%) |
| | N | 103 | (48%) | 40 | (36%) | 143 | (45%) |
| Tumour size | pT1 | 57 | (27%) | 17 | (16%) | 74 | (23%) |
| | pT2 | 115 | (54%) | 73 | (66%) | 188 | (58%) |
| | pT3 | 41 | (19%) | 20 | (18%) | 61 | (19%) |
| N | N− | 56 | (26%) | 11 | (10%) | 67 | (21%) |
| | N+ | 157 | (74%) | 99 | (90%) | 256 | (79%) |
| N. cat | N1 | 43 | (20%) | 12 | (11%) | 55 | (17%) |
| | N2 | 72 | (34%) | 60 | (55%) | 132 | (41%) |
| | N3 | 98 | (46%) | 41 | (34%) | 139 | (43%) |
| grade SBR | I | 29 | (14%) | 16 | (15%) | 45 | (14%) |
| | II | 99 | (46%) | 55 | (50%) | 154 | (48%) |
| | III | 82 | (38%) | 39 | (35%) | 121 | (38%) |
| RE (10%) | RE− | 80 | (43%) | 32 | (31%) | 112 | (38%) |
| | RE+ | 104 | (57%) | 76 | (69%) | 180 | (62%) |
| RP (10%) | RP− | 62 | (38%) | 30 | (29%) | 92 | (34%) |
| | RP+ | 100 | (62%) | 78 | (71%) | 178 | (56%) |
| RH (10%) | RH− | 46 | (24%) | 23 | (21%) | 69 | (23%) |
| | RH+ | 143 | (76%) | 86 | (79%) | 229 | (77%) |
| Her2/neu | 0-1-2 | 174 | (82%) | 19 | (17%) | 193 | (60%) |
| | 3 | 35 | (16%) | 1 | (<1%) | 36 | (11%) |
| | NA | 4 | (2%) | 90 | (78%) | 94 | (29%) |
| Hormono- | N | 77 | (36%) | 38 | (35%) | 105 | (33%) |
| therapy | Y | 136 | (64%) | 72 | (65%) | 208 | (67%) |
| Follow-up | median | 61 | | 84 | | 70 | |
| Metastasis | N | 163 | (77%) | 73 | (66%) | 236 | (70%) |
| | Y | 50 | (23%) | 37 | (34%) | 87 | (30%) |
| 5 year MFS | MFS | 77.5% | | 71.8% | | 75.6% | |
| Deaths from | N | 172 | (81%) | 85 | (77%) | 257 | (80%) |
| breast cancer | Y | 41 | (19%) | 25 | (23%) | 66 | (20%) |

| | | | | |
|---|---|---|---|---|
| Specific | SS | 81.7% | 82.7% | 82% |
| Survival at | | | | |
| 5 years | | | | |

[0117] Validation Set demography (PACS01, Bordeaux, total):

| Age | median | 50 | | 44 | | 49 | |
|---|---|---|---|---|---|---|---|
| | (min-max) | | | | | | |
| menopausal | Y | 60 | (37%) | 1 | (6%) | 61 | (34%) |
| | N | 104 | (63%) | 15 | (88%) | 119 | (66%) |
| Tumour size | pT1 | 27 | (16%) | 9 | (53%) | 37 | (20%) |
| | pT2 | 116 | (71%) | 8 | (47%) | 125 | (69%) |
| | pT3 | 16 | (10%) | 0 | (0%) | 16 | (9%) |
| N | N− | 0 | (0%) | 0 | (0%) | 0 | (0%) |
| | N+ | 164 | (100%) | 17 | (100%) | 181 | (0%) |
| N. cat | N1 | 0 | (0%) | 0 | (0%) | 0 | (0%) |
| | N2 | 80 | (49%) | 14 | (82%) | 94 | (52%) |
| | N3 | 84 | (51%) | 3 | (18%) | 87 | (48%) |
| grade SBR | I | 24 | (15%) | 2 | (12%) | 26 | (14%) |
| | II | 60 | (37%) | 7 | (41%) | 67 | (37%) |
| | III | 75 | (46%) | 8 | (47%) | 83 | (46%) |
| RE (10%) | RE− | 121 | (74%) | 5 | (29%) | 126 | (70%) |
| | RE+ | 31 | (19%) | 12 | (71%) | 43 | (24%) |
| RP (10%) | RP− | 54 | (33%) | 4 | (24%) | 58 | (32%) |
| | RP+ | 110 | (67%) | 13 | (76%) | 123 | (68%) |
| RH (10%) | RH− | 33 | (20%) | 3 | (18%) | 37 | (20%) |
| | RH+ | 131 | (80%) | 14 | (82%) | 145 | (80%) |
| Her2/neu | 0-1-2 | 113 | (69%) | 13 | (76%) | 126 | (70%) |
| | 3 | 15 | (9%) | 4 | (24%) | 19 | (10%) |
| | NA | 36 | (22%) | 0 | (0%) | 36 | (20%) |
| Hormono- | N | 53 | (32%) | 14 | (82%) | 67 | (37%) |
| therapy | Y | 76 | (46%) | 3 | (18%) | 79 | (44%) |
| | NA | 36 | (22%) | 0 | (0%) | 36 | (19%) |
| Follow-up | median | 59 | | 123 | | 59 | |
| Metastasis | N | 127 | (77%) | 12 | (71%) | 139 | (77%) |
| | Y | 37 | (23%) | 5 | (29%) | 42 | (23%) |
| 5 y MFS | MFS | 78.6% | | 70.6% | | 77.8% | |
| Deaths from | N | 140 | (85%) | 12 | (71%) | 152 | (84%) |
| breast cancer | Y | 24 | (15%) | 5 | (29%) | 29 | (16%) |

| | | | | |
|---|---|---|---|---|
| Specific | SS | 85.4% | 70.6% | 84% |
| Survival at | | | | |
| 5 years | | | | |

### 3) Method for Gene Profiling:

[0118] Radio-labeled [A³³P]-dCTP cDNA probes are obtained by reverse transcription from 3 μg of total RNA. Probes are then hybridised on IPSOGEN's 10K DiscoveryChip™, consisting of nylon membranes containing 9600 spotted cDNA (Discovery™ platform).

[0119] Following hybridization, membranes are washed and exposed to phosphor-imaging plates, then scanned with a Fuji-BAS 5000 machine. Signal intensities are quantified using the Fuji ArrayGauge v1.2 program, and the resulting raw data are analysed.

### 4) Analysis:

### 4-1: Normalisation and Filtering:

[0120] Raw data are exported from Ipsogen database. Spots for which spotted DNA amount is too low are invalidated from further analysis. Data are then normalized as compared to a reference sample using a non-linear rank based method (Sabatti et al., 2002). Normalized data are then filtered to eliminate low intensity genes, for which expression level is comparable to non-specific signal and the measure highly uncertain.

[0121] Data quality controls are performed based on hierarchical clustering grouping samples and genes according to their profile similarity. Biological pertinence of samples and genes clusters insures good quality data and allow for further analysis.

[0122] Since we analysed several samples series we performed a supplementary data normalization to insure inter-series comparability. Comparability was checked by hierarchical clustering.

### 4-2: Phenotypic Signatures Identification:

[0123] We performed supervised analysis using MaxT method available on Bioconductor (Ge, Dudoit & Speed, 2003) for several phenotypic markers: ER, PR, HER2/Neu, MIB/KI67, EGFR. The five markers were all measured by standard immunohistochemistry (IHC).

[0124] Supervised analyses were performed on a 159 samples identification set for ER, PR, HER2/Neu and EGFR markers, and on a 114 samples identification set for MIB/KI67. Each identified signature was then validated on one to four independent datasets.

[0125] Validation consisted in status prediction for independent samples using the LPS method (Linear Predictor Score) (Wright et al., PNAS, 2003, vol. 100, no. 17, 9991-9996). Prediction of all independent samples allowed for sensitivity and specificity evaluation for each identified signature.

### 4-3: Metagenes Calculation:

[0126] We considered as a metagene a group of genes for which expression variation (but not necessarily expression level) across tumors is correlated. The assumption is that the error made on the measurement of expression level from a single gene is highly reduced when considering several genes. So even in the case that an individual gene is poorly measured, its contribution in the metagene value is weighted by the number of genes considered and the final value for the metagene is lowly affected.

[0127] Metagenes were calculated from both supervised and unsupervised data.

[0128] Metagenes from phenotypic signatures: Phenotypic signatures correspond to genes correlated with a given phenotypic marker assessed by current standards such as immunohistochemistry (IHC) or FISH. A gene is considered correlated by a modified t test (MaxT method) which tests the significance of differential expression with a 5% risk. Each phenotypic signature is composed of two gene subsets, which expression levels are anti-correlated. One group of gene is overexpressed in a group of tumours (for example ER+ tumours) while the other group is underexpressed in the same group of tumours. Although expression variation is correlated across samples, expression levels may vary between genes, then leading to non robust average expression. It is assumed that even if expression levels vary, differential expression according to a reference sample belongs to the same dynamic range for all genes, allowing average calculation. For each tumour, each gene measure is divided by the expression level of the gene in a reference sample (log ratio) and the corresponding metagene is the average of those log ratios.

[0129] Each signature allowed the calculation of two anti-correlated metagenes. For instance, ER signature gives 2 metagenes, underER (genes under expressed in ER+ tumours) and overER (genes over expressed in ER+ tumours).

[0130] Metagenes from unsupervised analyses: we also defined metagenes as groups of genes with correlated expression variation across samples based on hierarchical clustering on a 468 samples set. A group of genes was retained if it contained at least 5 genes and had a node correlation coefficient higher than 0.5. Groups of genes that corresponded to previously identified metagenes by supervised analysis were not further considered. Metagenes were obtained as the mean of the log ratios of the genes contained in a given group.

### 4-4: Biostatistics

[0131] Since we failed to identify any robust gene signature based on classical supervised analysis for the metastasis, it seems that obviously a single set of correlated genes is not able to predict metastasis.

[0132] The biostatistic approach was then based on survival analysis, and the objective was, instead of separating metastasis from non metastasis patients, to identify two groups of patients with significantly different outcome. The event considered is the metastasis without considering any previous event such as local relapse.

[0133] Model calculation: We used the Cox regression to identify a combination of metagenes able to add prognostic information to already existing prognostic factors, such as SBR grade, tumour size, or lymph node involvement. Cox proportional hazard ratio analysis consists in the calculation of a likelihood function, which gives for a patient the probability to observe the event at a given time (death, metastasis), knowing that he survived until this time. The likelihood function is independent of time, and takes into account a “baseline” risk which is common to every patient, and the risk which is associated to different explanatory variables (which values differ between patients). The baseline risk function is unknown and eliminated as far as ratios between patients are considered. Then, the log-likelihood is defined as a linear function of explanatory variables, each one being appropriately weighted by a given coefficient. The coefficients are estimated by the algorithm to maximize the log-likelihood function.

[0134] For this, we use a forward stepwise approach to select the most significant metagenes, the threshold p-value being fixed to 10%. To obtain a model dependant on metagenes information and not influenced by already known clinical parameters, the analysis was stratified on the clinical parameters SBR grade, tumour size and lymph node synthesized in a single parameter, the NPI (Nottingham Prognostic Index). Moreover, since the identification set was composed of patients originating from different anti-cancer centers, we also stratified the analysis on the center of origin.

[0135] Once a combination of metagenes was obtained we calculated for each patient a score based on the linear combination of the metagenes values weighted by the coefficient calculated by the algorithm for each metagene. The exponential value of the coefficient corresponds to the hazard ratio associated to the metagene. For each parameter estimation, the algorithm gives the 95% confidence interval. Hence any combination of values comprised in the confidence intervals can be used to separate patients into significantly different prognostic groups.

[0136] Prognostic groups determination: The distribution of the scores in the identification set was used to determine the most significant cut-off to separate patients into two groups of different outcome. We tested three thresholds, 1^{st}, 2^{nd}, and 3^{rd} quartile, and performed in each case the logrank test to compare the two groups of patients. We used a step by step approach to define the optimized threshold, testing all score values as a potential threshold.

[0137] The cut-off was the one for which the p value associated to the log rank test was the most significant.

[0138] Validation on an independent validation set: for each patient of the validation set, we calculated the score and separated the patients into two prognostic groups using the coefficients and the threshold determined on the identification set. The score was calculated without considering the outcome (DFS-Disease Free Survival) of individual patients.

[0139] The validation was appreciated by the p value of the log rank test, which has to be <5% to consider the model validated.

[0140] We verified that the identified model effectively added relevant information as compared to standard parameters by performing multivariate Cox analyses which integrate clinical parameters and the model.

[0141] Sample prediction: For any new sample to be predicted raw data are normalized according to the reference sample previously defined and metagenes are calculated. The formula calculated on the identification set is then applied to the new sample, allowing the attribution of a specific score to each sample. The score is compared to the threshold optimized from the identification procedure and the patient is declared to belong to the good prognosis group if its score is lower or equal to the threshold and to the poor prognosis group if its score is higher than the threshold.

### 5) Results:

### 5-1: Metagene Selection

[0142] We started from 9 metagenes calculated from supervised analyses, and 17 metagenes from unsupervised analysis.

[0143] A first analysis based on the correlation between metagenes and robustness reduced the potential candidates to 19 metagenes, 7 from supervised analysis and 12 from unsupervised analysis.

### 5-2: Univariate Analysis

[0144] Each metagene was first tested in a univariate Cox analysis, and none of them could be found significant alone as shown in the following table.

| | Parameter | | |
|---|---|---|---|
| Variable | Estimate | Hazard Ratio | p value |
| underER | 0.468 | 1.597 | 0.59 |
| underPR | −0.474 | 0.622 | 0.32 |
| underEGFR | −1.132 | 0.322 | 0.06 |
| overEGFR | −0.261 | 0.771 | 0.59 |
| underMIB | −0.951 | 0.387 | 0.18 |
| overMIB | 0.927 | 2.528 | 0.37 |
| overERBB2 | 0.089 | 1.094 | 0.88 |
| MG48 | −0.398 | 0.672 | 0.46 |
| MG187 | −0.453 | 0.636 | 0.38 |
| MG66 | −0.423 | 0.655 | 0.40 |
| MG27 | 0.193 | 1.21 | 0.65 |
| MG51 | −0.182 | 0.834 | 0.75 |
| MG141 | −0.076 | 0.927 | 0.90 |
| MG144 | −0.256 | 0.774 | 0.70 |
| MG171 | 0.131 | 1.14 | 0.82 |
| MG240 | −0.304 | 0.738 | 0.55 |
| MG310 | 0.271 | 1.31 | 0.61 |
| MG448 | −1.03 | 0.358 | 0.10 |
| MG1001 | −0.34 | 0.712 | 0.31 |

### 5-3: Description of Selected Metagenes and Combination Thereof

[0145] Multivariate Cox analyses allowed identification of significant metagenes and combinations thereof associated with prognosis. The constituents of the selected metagenes and these combinations are described hereafter.

### Example 2

### Identification of a First Metagene Combination

[0146] The Cox analysis using forward stepwise procedure identified the three following significant metagenes (underER, underPR and underEGFR) associated with good or poor prognosis.

TABLE I
(Metagene UnderER)

| | | | | | Reduced | Reduced |
|---|---|---|---|---|---|---|
| | | | | | metagene | metagene |
| Gene | Unigene Cluster | Regulation | P value | Ref. Seq | 27 | 20 |
| ITGB3 | ughs.218040:186 | − | 0.00001 | SEQ ID | + | + |
| integrin, beta 3 (platelet | | | | No: 374 | | |
| glycoprotein iiia, | | | | (nm_000212) | | |
| antigen cd61) | | | | | | |
| PADI2 | ughs.33455:186 | − | 0.00001 | SEQ ID | + | + |
| peptidyl arginine | | | | No: 1027 | | |
| deiminase, type ii | | | | (nm_007365) | | |
| SOD2 | ughs.487046:186 | − | 0.00001 | SEQ ID | + | + |
| superoxide dismutase | | | | No: 598 | | |
| 2, mitochondrial | | | | (nm_000636) | | |
| FLJ13154 | ughs.408702:186 | − | 0.00003 | SEQ ID | − | − |
| hypothetical protein | | | | No: 717 | | |
| flj13154 | | | | (nm_024598) | | |
| HDAC2 | ughs.3352:186 | − | 0.00004 | SEQ ID | + | + |
| histone deacetylase 2 | | | | No: 573 | | |
| | | | | (nm_001527) | | |
| SLAC2-B | N_A | − | 0.00006 | SEQ ID | + | + |
| | | | | No: 83 | | |
| | | | | (nm_015065) | | |
| S100A8 | ughs.416073:186 | − | 0.00006 | SEQ ID | + | + |
| s100 calcium binding | | | | No: 12 | | |
| protein a8 (calgranulina) | | | | (nm_002964) | | |
| GSTP1 | ughs.523836:186 | − | 0.00006 | SEQ ID | + | + |
| glutathione s- | | | | No: 405 | | |
| transferase pi | | | | (nm_000852) | | |
| LCN2 | ughs.204238:186 | − | 0.00012 | SEQ ID | + | + |
| lipocalin 2 (oncogene | | | | No: 856 | | |
| 24p3) | | | | (nm_005564) | | |
| MYBL2 | ughs.179718:186 | − | 0.00013 | SEQ ID | + | − |
| v-myb myeloblastosis | | | | No: 384 | | |
| viral oncogene homolog | | | | (nm_002466) | | |
| (avian)-like 2 | | | | | | |
| PFKP | ughs.26010:186 | − | 0.00081 | SEQ ID | + | + |
| phosphofructokinase, | | | | No: 167 | | |
| platelet | | | | (nm_002627) | | |
| STK6 | ughs.250822:186 | − | 0.00134 | SEQ ID | + | + |
| serine/threonine kinase 6 | | | | No: 51 | | |
| | | | | (nm_198433) | | |
| GPR125 | ughs.99195:186 | − | 0.00153 | SEQ ID | − | − |
| g protein-coupled | | | | No: 999 | | |
| receptor 125 | | | | (nm_145290) | | |
| DSCR1 | ughs.282326:186 | − | 0.00206 | SEQ ID | − | − |
| down syndrome critical | | | | No: 979 | | |
| region gene 1 | | | | (nm_004414) | | |
| FAT | ughs.481371:186 | − | 0.0023 | SEQ ID No: 2 | + | − |
| fat tumor suppressor | | | | (nm_005245) | | |
| homolog 1 (drosophila) | | | | | | |
| VGLL1 | N_A | − | 0.00247 | SEQ ID | + | + |
| vestigial like 1 | | | | No: 98 | | |
| (drosophila) | | | | (nm_016267) | | |
| MMP7 | ughs.2256:186 | − | 0.00264 | SEQ ID | + | + |
| matrix | | | | No: 751 | | |
| metalloproteinase 7 | | | | (nm_002423) | | |
| (matrilysin, uterine) | | | | | | |
| ENO1 | ughs.517145:186 | − | 0.00348 | SEQ ID | + | + |
| enolase 1, (alpha) | | | | No: 696 | | |
| | | | | (nm_001428) | | |
| cdna clone | ughs.175285:186 | − | 0.00429 | SEQ ID | + | − |
| image:4831215 | | | | No: 1050 | | |
| | | | | (BC034638) | | |
| SCP2 | ughs.476365:186 | − | 0.00469 | SEQ ID | − | − |
| sterol carrier protein 2 | | | | No: 488 | | |
| | | | | (nm_002979) | | |
| CEBPB | ughs.517106:186 | − | 0.00507 | SEQ ID | + | + |
| ccaat/enhancer binding | | | | No: 262 | | |
| protein (c/ebp), beta | | | | (nm_005194) | | |
| TGM1 | ughs.508950:186 | − | 0.00695 | SEQ ID | + | + |
| transglutaminase 1 (k | | | | No: 1020 | | |
| polypeptide epidermal | | | | (nm_000359) | | |
| type i, protein- | | | | | | |
| glutamine-gamma- | | | | | | |
| glutamyltransferase) | | | | | | |
| | N_A | − | 0.00764 | SEQ ID | − | − |
| | | | | No: 1106 | | |
| | | | | (BC015969) | | |
| GGH | ughs.78619:186 | − | 0.00881 | SEQ ID | + | − |
| gamma-glutamyl | | | | No: 952 | | |
| hydrolase (conjugase, | | | | (nm_003878) | | |
| folylpolygammaglutamyl | | | | | | |
| hydrolase) | | | | | | |
| GSTA4 | ughs.485557:186 | − | 0.00995 | SEQ ID | − | − |
| glutathione s- | | | | No: 675 | | |
| transferase a4 | | | | (nm_001512) | | |
| FN5 | ughs.438064:186 | − | 0.0109 | SEQ ID | − | − |
| b-cell cll/lymphoma 7b | | | | No: 289 | | |
| | | | | (nm_020179) | | |
| CCNB2 | ughs.194698:186 | − | 0.01221 | SEQ ID | − | − |
| glutamate | | | | No: 553 | | |
| decarboxylase 1 (gad | | | | (nm_004701) | | |
| 1) | | | | | | |
| CTSC | ughs.128065:186 | − | 0.01501 | SEQ ID | + | + |
| cathepsin c | | | | No: 579 | | |
| | | | | (nm_001814) | | |
| PBEF1 | ughs.489615:186 | − | 0.01621 | SEQ ID | + | + |
| pre-b-cell colony | | | | No: 760 | | |
| enhancing factor 1 | | | | (nm_005746) | | |
| S100A6 | ughs.275243:186 | − | 0.01719 | SEQ ID | + | + |
| s100 calcium binding | | | | No: 805 | | |
| protein a6 (calcyclin) | | | | (nm_014624) | | |
| RDX | ughs.263671:186 | − | 0.01753 | SEQ ID | + | − |
| radixin | | | | No: 361 | | |
| | | | | (nm_002906) | | |
| GPR126 | ughs.318894:186 | − | 0.01886 | SEQ ID | − | − |
| g protein-coupled | | | | No: 448 | | |
| receptor 126 | | | | (nm_198569) | | |
| MMP15 | ughs.80343:186 | − | 0.0274 | SEQ ID | − | − |
| matrix | | | | No: 170 | | |
| metalloproteinase 15 | | | | (nm_002428) | | |
| (membrane-inserted) | | | | | | |
| KLK6 | ughs.79361:186 | − | 0.02892 | SEQ ID | + | + |
| kallikrein 6 (neurosin, | | | | No: 878 | | |
| zyme) | | | | (nm_002774) | | |
| | N_A | − | 0.0351 | SEQ ID | − | − |
| | | | | No: 1117 | | |
| BOK | ughs.293753:186 | − | 0.03747 | SEQ ID | + | + |
| bcl2-related ovarian | | | | No: 612 | | |
| killer | | | | (nm_032515) | | |
| CDKL5 | ughs.435570:186 | − | 0.03754 | SEQ ID | − | − |
| cyclin-dependent | | | | No: 540 | | |
| kinase-like 5 | | | | (nm_003159) | | |
| CSTB | ughs.695:186 | − | 0.0382 | SEQ ID | − | − |
| cystatin b (stefin b) | | | | No: 823 | | |
| | | | | (nm_000100) | | |
| LOC151194 | ughs.552610:186 | − | 0.03884 | SEQ ID | − | − |
| similar to hepatocellular | | | | No: 131 | | |
| carcinoma-associated | | | | (nm_145280) | | |
| antigen hca557b | | | | | | |
| NFIB | ughs.370359:186 | − | 0.03949 | SEQ ID | − | − |
| nuclear factor i/b | | | | No: 705 | | |
| | | | | (nm_005596) | | |
| LAD1 | ughs.519035:186 | − | 0.04184 | SEQ ID | + | − |
| ladinin 1 | | | | No: 31 | | |
| | | | | (nm_005558) | | |
| MGC11271 | ughs.143288:18 | − | 0.04312 | SEQ ID | + | − |
| hypothetical protein 6 | | | | No: 199 | | |
| mgc11271 | | | | (nm_024323) | | |

TABLE II
(Metagene Under PR)

| | | | | | Reduced | Reduced |
|---|---|---|---|---|---|---|
| | | | | | Metagene | Metagene |
| Gene | Unigene Cluster | Regulation | P value | Ref. Seq | 35 | 6 |
| SOD2 | ughs.487046:186 | − | 0.00001 | SEQ ID | − | − |
| superoxide dismutase | | | | No: 598 | | |
| 2, mitochondrial | | | | (nm_000636) | | |
| IGHG1 | ughs.510635:186 | − | 0.00001 | SEQ ID | − | − |
| immunoglobulin heavy | | | | No: 1122 | | |
| constant gamma 1 | | | | | | |
| (g1m marker) | | | | | | |
| KDR | ughs.479756:186 | − | 0.00011 | SEQ ID | + | + |
| kinase insert domain | | | | No: 364 | | |
| receptor (a type iii | | | | (nm_002253) | | |
| receptor tyrosine | | | | | | |
| kinase) | | | | | | |
| KLF1 | ughs.37860:186 | − | 0.00014 | SEQ ID | + | − |
| kruppel-like factor 1 | | | | No: 387 | | |
| (erythroid) | | | | (nm_006563) | | |
| CASP9 | ughs.329502:186 | − | 0.00016 | SEQ ID | + | + |
| caspase 9, apoptosis- | | | | No: 34 | | |
| related cysteine | | | | (nm_001229) | | |
| protease | | | | | | |
| BCL2 | ughs.150749:186 | − | 0.00018 | SEQ ID | + | + |
| b-cell oil/lymphoma 2 | | | | No: 657 | | |
| | | | | (nm_000633) | | |
| MYBL2 | ughs.179718:186 | − | 0.00025 | SEQ ID | − | − |
| v-myb myeloblastosis | | | | No: 384 | | |
| viral oncogene | | | | (nm_002466) | | |
| homolog (avian)-like 2 | | | | | | |
| ADAM10 | ughs.172028:186 | − | 0.00031 | SEQ ID | − | − |
| a disintegrin and | | | | No: 451 | | |
| metalloproteinase | | | | (nm_001110) | | |
| domain 10 | | | | | | |
| GPR125 | ughs.99195:186 | − | 0.00032 | SEQ ID | − | − |
| g protein-coupled | | | | No: 999 | | |
| receptor 125 | | | | (nm_145290) | | |
| | ughs.26192:186 | − | 0.00049 | SEQ ID | + | − |
| | | | | No: 1056 | | |
| | | | | (AK126297) | | |
| TGFBR3 | ughs.482390:186 | − | 0.00061 | SEQ ID | + | − |
| transforming growth | | | | No: 15 | | |
| factor, beta receptor iii | | | | (nm_003243) | | |
| (betaglycan, 300 kda) | | | | | | |
| LOC91316 | ughs.407693:186; | − | 0.00072 | SEQ ID | − | − |
| similar to bk246h3.1 | ughs.148656:186 | | | No: 1090 | | |
| (immunoglobulin | | | | (AK125808) | | |
| lambda-like | | | | | | |
| polypeptide 1, pre-b- | | | | | | |
| cell specific) | | | | | | |
| | ughs.416139:186 | − | 0.00074 | SEQ ID | + | − |
| | | | | No: 1120 | | |
| S100A8 | ughs.416073:186 | − | 0.00079 | SEQ ID | − | − |
| s100 calcium binding | | | | No: 12 | | |
| protein a8 (calgranulina) | | | | (nm_002964) | | |
| PIM2 | ughs.496096:186 | − | 0.00088 | SEQ ID | − | − |
| pim-2 oncogene | | | | No: 743 | | |
| | | | | (nm_006875) | | |
| TP53 | ughs.408312:186 | − | 0.00104 | SEQ ID | + | − |
| tumor protein p53 (li- | | | | No: 414 | | |
| fraumeni syndrome) | | | | (nm_000546) | | |
| ITGB3 | ughs.218040:186 | − | 0.00118 | SEQ ID | + | − |
| integrin, beta 3 | | | | No: 374 | | |
| (platelet glycoprotein | | | | (nm_000212) | | |
| iiia, antigen cd61) | | | | | | |
| LAMB1 | ughs.489646:186 | − | 0.00118 | SEQ ID | + | − |
| laminin, beta 1 | | | | No: 711 | | |
| | | | | (nm_002291) | | |
| SILV | ughs.95972:186 | − | 0.00118 | SEQ ID | + | − |
| silver homolog | | | | No: 663 | | |
| (mouse) | | | | (nm_006928) | | |
| cdna flj42596 fis, clone | ughs.113271:186 | − | 0.00121 | SEQ ID | − | − |
| brace3010283 | | | | No: 1102 | | |
| | | | | (AK124587) | | |
| PIGR | ughs.497589:186 | − | 0.00123 | SEQ ID | + | − |
| polymeric | | | | No: 237 | | |
| immunoglobulin | | | | (nm_002644) | | |
| receptor | | | | | | |
| CSH1 | ughs.347963:186 | − | 0.00161 | SEQ ID | + | − |
| chorionic | | | | No: 60 | | |
| somatomammotropin | | | | (nm_022640) | | |
| hormone 1 (placental | | | | | | |
| lactogen) | | | | | | |
| RDX | ughs.263671:186 | − | 0.00176 | SEQ ID | − | − |
| radixin | | | | No: 361 | | |
| | | | | (nm_002906) | | |
| ETF1/FLT1 | ughs.483494:186; | − | 0.0019 | SEQ ID | + | − |
| eukaryotic translation | ughs.507621:186 | | | No: 119 | | |
| termination factor | | | | (nm_004730) | | |
| 1/fms-related tyrosine | | | | or | | |
| kinase 1 | | | | SEQ ID | | |
| | | | | No: 1109 | | |
| | | | | (NM_002019) | | |
| PFKP | ughs.26010:186 | − | 0.00193 | SEQ ID | − | − |
| phosphofructokinase, | | | | No: 167 | | |
| platelet | | | | (nm_002627) | | |
| CXORF38 | ughs.495961:186 | − | 0.002 | SEQ ID | + | + |
| chromosome x open | | | | No: 339 | | |
| reading frame 38 | | | | (nm_144970) | | |
| MGC15606 | ughs.130195:186 | − | 0.00207 | SEQ ID | − | − |
| family with sequence | | | | No: 333 | | |
| similarity 55, member c | | | | (nm_145037) | | |
| SLAC2-B | N_A | − | 0.00236 | SEQ ID | − | − |
| slac2-b | | | | No: 83 | | |
| | | | | (nm_015065) | | |
| FLJ10986 | ughs.444301:186; | − | 0.00261 | SEQ ID | + | − |
| hypothetical protein | ughs.439112:186 | | | No: 330 | | |
| flj10986 | | | | (nm_018291) | | |
| SERPINB1 | ughs.381167:186 | − | 0.00368 | SEQ ID | + | − |
| serine (or cysteine) | | | | No: 1024 | | |
| proteinase inhibitor, | | | | (nm_030666) | | |
| clade b (ovalbumin), | | | | | | |
| member 1 | | | | | | |
| RPS6KA3 | ughs.445387:186 | − | 0.00482 | SEQ ID | + | + |
| ribosomal protein s6 | | | | No: 229 | | |
| kinase, 90 kda, | | | | (nm_004586) | | |
| polypeptide 3 | | | | | | |
| GATA6 | ughs.514746:186 | − | 0.00491 | SEQ ID | + | − |
| gata binding protein 6 | | | | No: 925 | | |
| | | | | (nm_005257) | | |
| MTIF2 | ughs.149894:186 | − | 0.00535 | SEQ ID | − | − |
| mitochondrial | | | | No: 788 | | |
| translational initiation | | | | (nm_001005369) | | |
| factor 2 | | | | | | |
| | N_A | − | 0.00572 | SEQ ID | + | − |
| | | | | No: 1104 | | |
| | | | | (AK128524) | | |
| | N_A | − | 0.00635 | SEQ ID | + | − |
| | | | | No: 1103 | | |
| | | | | (BX108410) | | |
| IFNGR1 | ughs.520414:186 | − | 0.00656 | SEQ ID | + | − |
| interferon gamma | | | | No: 66 | | |
| receptor 1 | | | | (nm_000416) | | |
| EBF | ughs.308048:186 | − | 0.00665 | SEQ ID | − | − |
| early b-cell factor | | | | No: 1030 | | |
| | | | | (nm_024007) | | |
| | N_A | − | 0.00729 | SEQ ID | + | + |
| | | | | No: 1119 | | |
| p66alpha | ughs.551742:186 | − | 0.00741 | SEQ ID | + | − |
| GATA zinc finger | | | | No: 1068 | | |
| domain containing 2A | | | | (AK024670) | | |
| (p66alpha) | | | | | | |
| FKBP1A | ughs.471933:186 | − | 0.00885 | SEQ ID | − | − |
| fk506 binding protein | | | | No: 241 | | |
| 1a, 12 kda | | | | (nm_000801) | | |
| SNAPC3 | ughs.546299:186 | − | 0.00887 | SEQ ID | − | − |
| small nuclear rna | | | | No: 398 | | |
| activating complex, | | | | (nm_003084) | | |
| polypeptide 3, 50 kda | | | | | | |
| IL2RB | ughs.474787:186; | − | 0.0097 | SEQ ID | + | − |
| interleukin 2 receptor, | ughs.555488:186 | | | No: 74 | | |
| beta | | | | (nm_000878) | | |
| Homo sapiens mRNA | ughs.535157:186 | − | 0.00973 | SEQ ID | − | − |
| for FLJ00204 protein | | | | No: 1087 | | |
| | | | | (AK074131) | | |
| ETV4 | ughs.434059:186 | − | 0.01003 | SEQ ID | − | − |
| ets variant gene 4 | | | | No: 955 | | |
| (e1a enhancer binding | | | | (nm_001986) | | |
| protein, e1af) | | | | | | |
| IL1R2 | ughs.25333:186 | − | 0.01009 | SEQ ID | − | − |
| interleukin 1 receptor, | | | | No: 71 | | |
| type ii | | | | (nm_004633) | | |
| IGHG1 | ughs.510635:186 | − | 0.01039 | SEQ ID | − | − |
| immunoglobulin heavy | | | | No: 1105 | | |
| constant gamma 1 | | | | (BC072392) | | |
| (g1m marker) | | | | | | |
| LCN2 | ughs.204238:186 | − | 0.01068 | SEQ ID | − | − |
| lipocalin 2 (oncogene | | | | No: 856 | | |
| 24p3) | | | | (nm_005564) | | |
| CMRF35 | ughs.2605:186 | − | 0.01119 | SEQ ID | + | − |
| cd300c antigen | | | | No: 231 | | |
| | | | | (nm_006678) | | |
| CXCL1 | ughs.789:186 | − | 0.01174 | SEQ ID | + | − |
| chemokine (c-x-c | | | | No: 593 | | |
| motif) ligand 1 | | | | (nm_001511) | | |
| (melanoma growth | | | | | | |
| stimulating activity, | | | | | | |
| alpha) | | | | | | |
| MYBL2 | ughs.179718:186 | − | 0.0122 | SEQ ID | + | − |
| v-myb myeloblastosis | | | | No: 384 | | |
| viral oncogene | | | | (nm_002466) | | |
| homolog (avian)-like 2 | | | | | | |
| SLAMF8 | ughs.438683:186 | − | 0.01309 | SEQ ID | − | − |
| slam family member 8 | | | | No: 519 | | |
| | | | | (nm_020125) | | |
| CTSC | ughs.128065:186 | − | 0.016 | SEQ ID | − | − |
| cathepsin c | | | | No: 579 | | |
| | | | | (nm_001814) | | |
| ENPP2 | ughs.190977:186 | − | 0.0205 | SEQ ID | + | − |
| ectonucleotide | | | | No: 1039 | | |
| pyrophosphatase/phosphodiesterase 2 | | | | (nm_006209) | | |
| (autotaxin) | | | | | | |
| LAD1 | ughs.519035:186 | − | 0.02102 | SEQ ID | − | − |
| ladinin 1 | | | | No: 31 | | |
| | | | | (nm_005558) | | |
| RABL3 | ughs.444360:186; | − | 0.02205 | SEQ ID | + | − |
| rab, member of ras | ughs.548087:186 | | | No: 327 | | |
| oncogene family-like 3 | | | | (nm_173825) | | |
| HDAC2 | ughs.3352:186 | − | 0.02428 | SEQ ID | − | − |
| histone deacetylase 2 | | | | No: 573 | | |
| | | | | (nm_001527) | | |
| VGLL1 | N_A | − | 0.02447 | SEQ ID | − | − |
| vestigial like 1 | | | | No: 98 | | |
| (drosophila) | | | | (nm_016267) | | |
| npc-a-5 | ughs.510543:186 | − | 0.02592 | SEQ ID | − | − |
| nasopharyngeal | | | | No: 1059 | | |
| carcinoma-associated | | | | (AK091113) | | |
| antigen npc-a-5 | | | | | | |
| CDK4 | ughs.95577:186 | − | 0.02615 | SEQ ID | + | − |
| cyclin-dependent | | | | No: 886 | | |
| kinase 4 | | | | (nm_000075) | | |
| ABCC5 | ughs.368563:186 | − | 0.02624 | SEQ ID | + | − |
| atp-binding cassette, | | | | No: 1032 | | |
| sub-family c (cftr/mrp), | | | | (nm_005688) | | |
| member 5 | | | | | | |
| MGC9913 | ughs.23133:186 | − | 0.02709 | SEQ ID | − | − |
| hypothetical protein | | | | No: 1091 | | |
| mgc9913 | | | | (XM_378178) | | |
| FUT8 | ughs.118722:186 | − | 0.02833 | SEQ ID | − | − |
| fucosyltransferase 8 | | | | No: 233 | | |
| (alpha (1,6) | | | | (nm_178155) | | |
| fucosyltransferase) | | | | | | |
| SFRP1 | ughs.213424:186 | − | 0.03011 | SEQ ID | − | − |
| secreted frizzled- | | | | No: 938 | | |
| related protein 1 | | | | (nm_003012) | | |
| ARPC2 | ughs.529303:186 | − | 0.03237 | SEQ ID | + | − |
| actin related protein | | | | No: 264 | | |
| 2/3 complex, subunit | | | | (nm_152862) | | |
| 2, 34 kda | | | | | | |
| LILRB2 | ughs.534386:186 | − | 0.03294 | SEQ ID | − | − |
| leukocyte | | | | No: 546 | | |
| immunoglobulin-like | | | | (nm_005874) | | |
| receptor, subfamily b | | | | | | |
| (with tm and itim | | | | | | |
| domains), member 2 | | | | | | |
| IGKC | ughs.449621:186; | − | 0.03458 | SEQ ID | − | − |
| immunoglobulin kappa | ughs.546620:186 | | | No: 1099 | | |
| constant | | | | (BC066343) | | |
| SN | ughs.31869:186 | − | 0.03771 | SEQ ID | + | − |
| sialoadhesin | | | | No: 1037 | | |
| | | | | (nm_023068) | | |
| C1ORF38 | ughs.10649:186 | − | 0.03783 | SEQ ID | − | − |
| chromosome 1 open | | | | No: 550 | | |
| reading frame 38 | | | | (nm_004848) | | |
| PADI2 | ughs.33455:186 | − | 0.0418 | SEQ ID | − | − |
| peptidyl arginine | | | | No: 1027 | | |
| deiminase, type ii | | | | (nm_007365) | | |
| MONDOA | ughs.437153:186 | − | 0.04548 | SEQ ID | + | − |
| mix interactor | | | | No: 1005 | | |
| | | | | (nm_014938) | | |
| TAP1 | ughs.352018:186; | − | 0.04583 | SEQ ID | − | − |
| transporter 1, atp- | ughs.552165:186 | | | No: 820 | | |
| binding cassette, sub- | | | | (nm_000593) | | |
| family b (mdr/tap) | | | | | | |
| CYP2D6 | ughs.534311:186 | − | 0.04704 | SEQ ID | − | − |
| cytochrome p450, | | | | No: 370 | | |
| family 2, subfamily d, | | | | (nm_000106) | | |
| polypeptide 6 | | | | | | |

TABLE III
(Metagene UnderEGFR)

| | | | | | Reduced | Reduced |
|---|---|---|---|---|---|---|
| | | | | | Metagene | Metagene |
| Gene | Unigene Cluster | Regulation | P value | Ref. Seq | 34 | 22 |
| LOC255743: | N_A | − | 0.00001 | SEQ ID | + | + |
| Nephronectin | | | | No: 1071 | | |
| | | | | (NM_001033047) | | |
| LU | ughs.155048:186 | − | 0.00001 | SEQ ID | + | + |
| lutheran blood group | | | | No: 254 | | |
| (auberger b antigen | | | | (nm_005581) | | |
| included) | | | | | | |
| TFF1 | ughs.162807:186 | − | 0.00001 | SEQ ID No: 6 | + | + |
| trefoil factor 1 (breast | | | | (nm_003225) | | |
| cancer, estrogen- | | | | | | |
| inducible sequence | | | | | | |
| expressed in) | | | | | | |
| ESR1 | ughs.208124:186 | − | 0.00001 | SEQ ID | + | + |
| estrogen receptor 1 | | | | No: 883 | | |
| | | | | (nm_000125) | | |
| XBP1 | ughs.437638:186 | − | 0.00001 | SEQ ID | + | + |
| x-box binding protein 1 | | | | No: 543 | | |
| | | | | (nm_005080) | | |
| SCUBE2 | ughs.523468:186 | − | 0.00001 | SEQ ID | + | + |
| signal peptide, cub | | | | No: 681 | | |
| domain, egf-like 2 | | | | (nm_020974) | | |
| GATA3 | ughs.524134:186 | − | 0.00001 | SEQ ID No: 63 | + | + |
| gata binding protein 3 | | | | (nm_001002295) | | |
| EIF2C3 | ughs.530333:186 | − | 0.00001 | SEQ ID | + | + |
| eukaryotic translation | | | | No: 212 | | |
| initiation factor 2c, 3 | | | | (nm_024852) | | |
| C4A | ughs.534847:186 | − | 0.00001 | SEQ ID | + | + |
| complement | | | | No: 635 | | |
| component 4b, | | | | (nm_001002029) | | |
| telomeric | | | | | | |
| TFF3 | ughs.82961:186 | − | 0.00001 | SEQ ID | + | + |
| trefoil factor 3 | | | | No: 535 | | |
| (intestinal) | | | | (nm_003226) | | |
| | N_A | − | 0.00003 | SEQ ID | + | + |
| | | | | No: 1125 | | |
| NAT1 | ughs.155956:186 | − | 0.00003 | SEQ ID | + | − |
| n-acetyltransferase 1 | | | | No: 109 | | |
| (arylamine n- | | | | (nm_000662) | | |
| acetyltransferase) | | | | | | |
| COL4A2 | ughs.508716:186 | − | 0.00003 | SEQ ID | + | − |
| collagen, type iv, alpha 2 | | | | No: 342 | | |
| | | | | (nm_001846) | | |
| RABEP1 | ughs.551518:186 | − | 0.00003 | SEQ ID | + | − |
| rabaptin, rab gtpase | | | | No: 927 | | |
| binding effector protein 1 | | | | (nm_004703) | | |
| | N_A | − | 0.00005 | SEQ ID | + | + |
| | | | | No: 1124 | | |
| RHOBTB3 | ughs.445030:186 | − | 0.00006 | SEQ ID | − | − |
| rho-related btb domain | | | | No: 124 | | |
| containing 3 | | | | (nm_014899) | | |
| CASKIN1/flj12650 | ughs.530863:186; | − | 0.00006 | SEQ ID | + | − |
| cask interacting protein 1 | ughs.470259:186 | | | No: 280 | | |
| | | | | (nm_020764) | | |
| | | | | or SEQ ID | | |
| | | | | No: 1110 | | |
| | | | | (NM_024522) | | |
| CXXC5 | ughs.189119:186 | − | 0.00009 | SEQ ID | + | + |
| cxxc finger 5 | | | | No: 297 | | |
| | | | | (nm_016463) | | |
| MAPT | ughs.101174:186 | − | 0.0001 | SEQ ID | + | + |
| microtubule-associated | | | | No: 791 | | |
| protein tau | | | | (nm_016835) | | |
| MGC24047 | ughs.29190:186 | − | 0.0001 | SEQ ID | + | − |
| chromosome 1 open | | | | No: 210 | | |
| reading frame 64 | | | | (nm_178840) | | |
| MGC45441 | ughs.488337:186 | − | 0.00026 | SEQ ID | + | + |
| hypothetical protein | | | | No: 827 | | |
| mgc45441 | | | | (nm_152499) | | |
| CYP2B6 | N_A | − | 0.00065 | SEQ ID | − | − |
| Cytochrome P450, | | | | No: 1064 | | |
| family 2, subfamily B, | | | | (NM_000767) | | |
| polypeptide 6 | | | | | | |
| CROCC | ughs.309403:186; | − | 0.00072 | SEQ ID | − | − |
| ciliary rootlet coiled- | ughs.135718:186 | | | No: 147 | | |
| coil, rootletin | | | | (nm_014675) | | |
| USP21 | ughs.8015:186 | − | 0.00075 | SEQ ID | − | − |
| ubiquitin specific | | | | No: 323 | | |
| protease 21 | | | | (nm_001014443) | | |
| TRAF5 | ughs.523930:186 | − | 0.0011 | SEQ ID | − | − |
| tnf receptor-associated | | | | No: 106 | | |
| factor 5 | | | | (nm_004619) | | |
| GSTM2 | ughs.279837:186 | − | 0.00127 | SEQ ID | + | − |
| glutathione s- | | | | No: 181 | | |
| transferase m2 | | | | (nm_000848) | | |
| (muscle) | | | | | | |
| DUSP4 | ughs.417962:186 | − | 0.0015 | SEQ ID | − | − |
| dual specificity | | | | No: 376 | | |
| phosphatase 4 | | | | (nm_057158) | | |
| ASF1A | ughs.292316:186 | − | 0.00177 | SEQ ID | + | − |
| asf1 anti-silencing | | | | No: 116 | | |
| function 1 homolog a | | | | (nm_014034) | | |
| (s. cerevisiae) | | | | | | |
| CSF2 | ughs.1349:186 | − | 0.0024 | SEQ ID | − | − |
| colony stimulating | | | | No: 252 | | |
| factor 2 (granulocyte- | | | | (nm_000758) | | |
| macrophage) | | | | | | |
| CLSTN2 | ughs.158529:186 | − | 0.00247 | SEQ ID | − | − |
| calsyntenin 2 | | | | No: 797 | | |
| | | | | (nm_022131) | | |
| GLI3 | ughs.199338:186 | − | 0.00282 | SEQ ID | − | − |
| gli-kruppel family | | | | No: 911 | | |
| member gli3 (greig | | | | (nm_000168) | | |
| cephalopolysyndactyly | | | | | | |
| syndrome) | | | | | | |
| REPS2 | ughs.186810:186; | − | 0.00307 | SEQ ID | − | − |
| ralbp1 associated eps | ughs.131188:186 | | | No: 720 | | |
| domain containing 2 | | | | (nm_004726) | | |
| GSTM1 | ughs.301961:186 | − | 0.00307 | SEQ ID | − | − |
| glutathione s- | | | | No: 889 | | |
| transferase m1 | | | | (nm_000561) | | |
| PLAT | ughs.491582:186 | − | 0.00335 | SEQ ID | + | − |
| plasminogen activator, | | | | No: 250 | | |
| tissue | | | | (nm_000930) | | |
| DLG5 | ughs.500245:186 | − | 0.00393 | SEQ ID | − | − |
| discs, large homolog 5 | | | | No: 179 | | |
| (drosophila) | | | | (nm_004747) | | |
| FLJ00012 | ughs.21051:186 | − | 0.00396 | SEQ ID | − | − |
| flj00012 protein | | | | No: 786 | | |
| | | | | (nm_033388) | | |
| SIDT2 | ughs.410977:186 | − | 0.00409 | SEQ ID | + | − |
| sid1 transmembrane | | | | No: 177 | | |
| family, member 2 | | | | (nm_015996) | | |
| | N_A | − | 0.00434 | SEQ ID | − | − |
| | | | | No: 1047 | | |
| | | | | (BC012900) | | |
| BCL9 | ughs.415209:186 | − | 0.00434 | SEQ ID | − | − |
| b-cell cll/lymphoma 9 | | | | No: 301 | | |
| | | | | (nm_004326) | | |
| USP13 | ughs.175322:186 | − | 0.00516 | SEQ ID | + | + |
| ubiquitin specific | | | | No: 207 | | |
| protease 13 | | | | (nm_003940) | | |
| (isopeptidase t-3) | | | | | | |
| DNALI1 | ughs.406050:186 | − | 0.00606 | SEQ ID | − | − |
| dynein, axonemal, light | | | | No: 936 | | |
| intermediate | | | | (nm_003462) | | |
| polypeptide 1 | | | | | | |
| FOXC1/RHOB | ughs.348883:186; | − | 0.00652 | SEQ ID | + | + |
| forkhead box c1/ras | ughs.502876:186 | | | No: 916 | | |
| homolog gene | | | | (nm_001453) | | |
| | | | | or SEQ ID | | |
| | | | | No: 1116 | | |
| | | | | (NM_004040) | | |
| | N_A | − | 0.00699 | SEQ ID | + | + |
| | | | | No: 1052 | | |
| | | | | (BX096026) | | |
| KRT18 | ughs.406013:186 | − | 0.00879 | SEQ ID | + | + |
| keratin 18 | | | | No: 159 | | |
| | | | | (nm_000224) | | |
| | ughs.548040:186 | − | 0.00889 | SEQ ID | − | − |
| | | | | No: 1096 | | |
| | | | | (AK127274) | | |
| DNAJC12 | ughs.260720:186 | − | 0.0094 | SEQ ID No: 28 | − | − |
| dnaj (hsp40) homolog, | | | | (nm_021800) | | |
| subfamily c, member | | | | | | |
| 12 | | | | | | |
| cdna flj41270 fis, clone | ughs.445414:186 | − | 0.00963 | SEQ ID | − | − |
| bramy2036387 | | | | No: 1054 | | |
| | | | | (AK123264) | | |
| SPDEF/c8orf13 | ughs.124299:186; | − | 0.00981 | SEQ ID No: 25 | + | + |
| sam pointed domain | ughs.485158:186 | | | (nm_012391) | | |
| containing ets | | | | or SEQ ID | | |
| transcription factor/ | | | | No: 1108 | | |
| chromosome 8 open | | | | (NM_053279) | | |
| reading frame 13 | | | | | | |
| C20ORF23 | ughs.101774:186 | − | 0.01019 | SEQ ID | + | − |
| chromosome 20 open | | | | No: 825 | | |
| reading frame 23 | | | | (nm_024704) | | |
| FLJ20366 | ughs.390738:186 | − | 0.01278 | SEQ ID | + | − |
| hypothetical protein | | | | No: 145 | | |
| flj20366 | | | | (nm_017786) | | |
| COX6C | ughs.351875:186 | − | 0.01401 | SEQ ID | − | − |
| cytochrome c oxidase | | | | No: 491 | | |
| subunit vic | | | | (nm_004374) | | |
| RGS11 | ughs.65756:186 | − | 0.01422 | SEQ ID | − | − |
| regulator of g-protein | | | | No: 485 | | |
| signalling 11 | | | | (nm_003834) | | |
| Hypothetical protein | ughs.508559:186 | − | 0.01475 | SEQ ID | − | − |
| LOC153561 | | | | No: 1072 | | |
| | | | | (AY007114) | | |
| SEMA6B | ughs.465642:186 | − | 0.01572 | SEQ ID | − | − |
| sema domain, | | | | No: 274 | | |
| transmembrane | | | | (nm_032108) | | |
| domain (tm), and | | | | | | |
| cytoplasmic domain, | | | | | | |
| (semaphorin) 6b | | | | | | |
| AP1G2 | ughs.343244:186 | − | 0.01707 | SEQ ID | − | − |
| adaptor-related protein | | | | No: 258 | | |
| complex 1, gamma 2 | | | | (nm_080545) | | |
| subunit | | | | | | |
| AKAP8L | ughs.399800:186 | − | 0.01817 | SEQ ID | − | − |
| a kinase (prka) anchor | | | | No: 292 | | |
| protein 8-like | | | | (nm_014371) | | |
| PRKCBP1 | ughs.446240:186 | − | 0.01835 | SEQ ID | − | − |
| protein kinase c | | | | No: 803 | | |
| binding protein 1 | | | | (nm_183047) | | |
| CENTG3 | ughs.195048:186 | − | 0.02053 | SEQ ID | − | − |
| centaurin, gamma 3 | | | | No: 349 | | |
| | | | | (nm_031946) | | |
| genomic region on | ughs.159853:186 | − | 0.02456 | SEQ ID | − | − |
| chromosome 1 | | | | No: 1123 | | |
| SLC40A1 | ughs.529285:186 | − | 0.02463 | SEQ ID | − | − |
| solute carrier family 40 | | | | No: 763 | | |
| (iron-regulated | | | | (nm_014585) | | |
| transporter), member 1 | | | | | | |
| CCND2 | ughs.376071:186 | − | 0.02723 | SEQ ID | − | − |
| cyclin d2 | | | | No: 438 | | |
| | | | | (nm_001759) | | |
| KLHDC2 | N_A | − | 0.02795 | SEQ ID No: 94 | − | − |
| kelch domain | | | | (nm_014315) | | |
| containing 2 | | | | | | |
| ABCA3 | ughs.26630:186 | − | 0.03438 | SEQ ID | + | + |
| atp-binding cassette, | | | | No: 845 | | |
| sub-family a (abc1), | | | | (nm_001089) | | |
| member 3 | | | | | | |
| LOC143381 | ughs.388347:186; | − | 0.03705 | SEQ ID | − | − |
| hypothetical protein | ughs.557061:186 | | | No: 1084 | | |
| loc143381 | | | | (BX648964) | | |
| FLJ21439 | ughs.550536:186 | − | 0.03746 | SEQ ID | − | − |
| hypothetical protein | | | | No: 734 | | |
| flj21439 | | | | (nm_025137) | | |
| HOXA4 | ughs.77637:186 | − | 0.03897 | SEQ ID | − | − |
| homeo box a4 | | | | No: 943 | | |
| | | | | (nm_002141) | | |
| CACNA1D/KIF5C | ughs.476358:186; | − | 0.03958 | SEQ ID | + | + |
| Calcium channel, | ughs.435557:186 | | | No: 1085 | | |
| voltage-dependent, L | | | | (NM_000720) | | |
| type, alpha 1D | | | | | | |
| subunit/kinesin family | | | | | | |
| member 5c | | | | | | |
| GNG3 | ughs.179915:186 | − | 0.04937 | SEQ ID | + | − |
| guanine nucleotide | | | | No: 276 | | |
| binding protein (g | | | | (nm_012202) | | |
| protein), gamma 3 | | | | | | |

[0147] Multivariate Cox analysis allowed estimation of parameters corresponding to each of the selected metagenes:

| | Parameter | P value | |
|---|---|---|---|
| Metagene | estimation | (Chi square) | Hazard Ratio |
| UnderER | −2.90279 | 0.0906 | 0.055 |
| UnderPR | −1.47423 | 0.0143 | 0.229 |
| UnderEGFR | −4.17198 | 0.0012 | 0.015 |

[0148] On the basis of these parameters, the score for prognosis has been established as follows:

Score=−2.90279*underER−1.47423*underPR−4.17198*underEGFR

[0149] Threshold optimization: we tested all the possible thresholds. As an example 1^{st}, 2^{nd} and 3^{rd} quartile of the score distribution of the training set and found 0.502, 0.0057 and <0.0001 respectively for the p value associated to the log rank test.

[0150] The 3^{rd} quartile (cut-off=0.087646) was then defined as the optimal cut-off to separate patients into two groups with the highest significance.

[0151] The error on the score was integrated by calculating a confidence interval around the threshold, within which sample classification was considered non robust. Considering the score distribution Gaussian, we estimated the confidence interval around the threshold using standard deviation calculation method (estimated standard deviation of the population/√n).

[0152] The inventors have established that a woman having a score (S_{C}) of more than 0.136 have at least a double propensity of poor clinical outcome than a woman with a score (S_{C}) of less than 0.0393.

[0153] Model validation: the score was calculated for each of the 164 patients from the validation set and we separated the patients into two groups according the cut-off determined on the identification set. On the 164 patients, the model was well validated (p=4.7 10⁻⁰², log rank test) and separated the patients into a good-prognosis group with 80% 5-year MFS (84% of patients) and a poor-prognosis group with 63% 5-year MFS (13% of patients), 3% of patients being not interpretable. On a subset of the validation set, constituted of the clinical trial PACS01 (N=128), we obtained similar validation (p=3.9 10⁻⁰³, logrank test) with 88% of 5-year MFS in the good-prognosis group (80% of patients) and 65% of 5-year MFS in the poor-prognosis group (16% of patients, 4% of patients not interpretable).

[0154] Model performances: we performed multivariate analysis to determine the importance of the model as compared to standard clinical parameters. Even when considering grade, lymph node, ER status, age . . . , the model was still significant in the multivariate analysis, suggesting that it provides an independent, complementary and significant prognostic information.

[0155] Multivariate analysis on the global population (N=347)

| | | Hazard | CI95 | CI95 | |
|---|---|---|---|---|---|
| | | ratio | upper | lower | p |
| Age | <35 y | 1 | 0.16 | 2.79 | p = 0.57 |
| | >=35 y | 0.66 | | | |
| Menopausal | N | 1 | 0.82 | 1.9 | p = 0.31 |
| | Y | 1.24 | | | |
| Tumour size | pT1 | 1 | 0.95 | 2.74 | p = 0.078 |
| | pT2-pT3 | 1.61 | | | |
| N | N− | 1 | 0.76 | 2.76 | p = 0.26 |
| | N+ | 1.45 | | | |
| SBR grade | I | 1 | 0.96 | 5.35 | p = 0.062 |
| | II-III | 2.27 | | | |
| HR (10%) | HR− | 1 | 0.53 | 1.4 | p = 0.54 |
| | HR+ | 0.86 | | | |
| Erbb2 | 0-1-2 | 1 | 0.66 | 2.07 | p = 0.58 |
| | 3 | 1.17 | | | |
| Model | Good | 1 | 1.65 | 4.11 | P = 3.8 10⁻⁵ |
| | Poor | 2.61 | | | |

[0156] Multivariate analysis on the identification set (N=222)

| | | Hazard | CI95 | | |
|---|---|---|---|---|---|
| | | ratio | upper | CI95 lower | p |
| Age | <35 y | 1 | 0.19 | 10.8 | p = 0.73 |
| | >=35 y | 1.43 | | | |
| Menopausal | N | 1 | 0.64 | 1.68 | p = 0.89 |
| | Y | 1.03 | | | |
| Tumour size | pT1 | 1 | 0.63 | 1.97 | p = 0.7 |
| | pT2-pT3 | 1.12 | | | |
| N | N− | 1 | 0.9 | 3.34 | p = 0.1 |
| | N+ | 1.73 | | | |
| SBR grade | I | 1 | 0.87 | 5.08 | p = 0.098 |
| | II-III | 2.1 | | | |
| HR (10%) | HR− | 1 | 0.53 | 1.62 | p = 0.79 |
| | HR+ | 0.93 | | | |
| Erbb2 | 0-1-2 | 1 | 0.44 | 1.93 | p = 0.84 |
| | 3 | 0.93 | | | |
| Model | Good | 1 | 1.3 | 3.64 | P = 0.003 |
| | Poor | 2.18 | | | |

[0157] Multivariate analysis on the PACS01 clinical trial (N=108)

| | | | CI95 | CI95 | |
|---|---|---|---|---|---|
| | | Hazard ratio | upper | lower | p |
| Age | <35 y | 1 | 0 | Inf | p = 1 |
| | >=35 y | 518527625.4 | | | |
| Menopausal | N | 1 | 0.51 | 3.47 | p = 0.56 |
| | Y | 1.33 | | | |
| Tumour size | pT1 | 1 | 0 | Inf | p = 1 |
| | pT2-pT3 | 324628156.2 | | | |
| N | N− | 1 | | | p = NA |
| | N+ | | | | |
| SBR grade | I | 1 | 0 | Inf | p = 1 |
| | II-III | 287987535.5 | | | |
| HR (10%) | HR− | 1 | 0.36 | 5.61 | p = 0.62 |
| | HR+ | 1.42 | | | |
| Erbb2 | 0-1-2 | 1 | 0.68 | 6.66 | p = 0.19 |
| | 3 | 2.13 | | | |
| Model | Good | 1 | 1.58 | 17.74 | P = 0.0068 |
| | Poor | 5.3 | | | |

[0158] Metagenes Reduction:

[0159] In this model with underER, underPR and underEGFR, we defined the number of genes according to their significance in the metagene identification with the MaxT method. Even if the genes are well correlated between each other, some of them may be removed from further analysis, in order to reduce the number of genes to analyze and simplify the analysis process.

[0160] We calculated the correlation between each gene composing the metagene and the metagene, sorted the genes according to their increasing correlation to the metagene and progressively eliminated the genes the least correlated to the metagene, starting from 1 removed gene to all except one removed genes.

[0161] For each of these new sets of genes, we calculated a new metagene and its correlation with the original metagene. We selected given correlation cut-offs varying from 0.91 to 0.99 and integrated the corresponding new metagene in the model. This allowed us to generate a new score and prognostic group for each patient and to compare the attribution of a given prognostic group between the original model and the model with the optimized metagene. The criterion was equivalence between the 2 patients classification (with the original model and the optimized one) within the 2 prognostic groups.

[0162] As an example, we can reduce the number of genes from the metagene underER from 42 to 27 (Table I), while keeping 97% of equivalence (meaning that only 3% of patients are predicted in the opposite prognostic group when optimizing the metagene) for patient classification in the two prognostic groups on the validation set. With 20 genes (Table I), the concordancy is still of 95%.

[0163] In the same way, the metagene underPR may be reduced from 73 to 35 (Table II) and 6 genes (Table II) with 96% and 94% equivalence respectively for patient classification in the validation set.

[0164] The metagene underEGFR may be reduced from 71 to 34 (Table III) and 22 genes (Table III) with 95% and 91% concordancy respectively for patient classification in the validation set.

[0165] Considering optimization of the 3 metagenes, we reached on the validation set a concordancy of 91% and 90% with 102 and 50 genes respectively instead of the 186 genes used in the original model.

### Example 3

### Identification of a Second Significant Metagene Combination

[0166] Since ER and EGFR markers are correlated, with the majority of EGFR+ being ER−, we found another combination that could replace the metagenes underER and underPR by a single metagene overEGFR.

TABLE IV
(Metagene OverEGFR)

| | | | | | Reduced | Reduced |
|---|---|---|---|---|---|---|
| Gene | Unigene Cluster | Regulation | P value | Ref. Seq | Metagene 12 | Metagene 5 |
| GSTP1 | ughs.523836:186 | + | 0.00005 | SEQ ID | − | − |
| glutathione s- | | | | No: 405 | | |
| transferase pi | | | | (nm_000852) | | |
| ITGB3 | ughs.218040:186 | + | 0.00008 | SEQ ID | − | − |
| integrin, beta 3 | | | | No: 374 | | |
| (platelet | | | | (nm_000212) | | |
| glycoprotein iiia, | | | | | | |
| antigen cd61) | | | | | | |
| IGHG1 | ughs.510635:186 | + | 0.00011 | SEQ ID | + | + |
| immunoglobulin | | | | No: 1122 | | |
| heavy constant | | | | | | |
| gamma 1 (g1m | | | | | | |
| marker) | | | | | | |
| SOD2 | ughs.487046:186 | + | 0.00072 | SEQ ID | + | + |
| superoxide | | | | No: 598 | | |
| dismutase 2, | | | | (nm_000636) | | |
| mitochondrial | | | | | | |
| CEBPB | ughs.517106:186 | + | 0.00089 | SEQ ID | + | − |
| ccaat/enhancer | | | | No: 262 | | |
| binding protein | | | | (nm_005194) | | |
| (c/ebp), beta | | | | | | |
| IGKC | ughs.449621:186; | + | 0.00177 | SEQ ID | + | − |
| immunoglobulin | ughs.546620:186 | | | No: 1099 | | |
| kappa constant | | | | (BC066343) | | |
| ENO1 | ughs.517145:186 | + | 0.00201 | SEQ ID | + | + |
| enolase 1, | | | | No: 696 | | |
| (alpha) | | | | (nm_001428) | | |
| npc-a-5 | ughs.510543:186 | + | 0.00352 | SEQ ID | + | + |
| nasopharyngeal | | | | No: 1059 | | |
| carcinoma- | | | | (AK091113) | | |
| associated | | | | | | |
| antigen npc-a-5 | | | | | | |
| MMP7 | ughs.2256:186 | + | 0.00698 | SEQ ID | + | − |
| matrix | | | | No: 751 | | |
| metalloproteinase | | | | (nm_002423) | | |
| 7 (matrilysin, | | | | | | |
| uterine) | | | | | | |
| | N_A | + | 0.01196 | SEQ ID | + | − |
| | | | | No: 1121 | | |
| MKI67 | ughs.80976:186 | + | 0.0122 | SEQ ID | + | − |
| antigen identified | | | | No: 286 | | |
| by monoclonal | | | | (nm_002417) | | |
| antibody ki-67 | | | | | | |
| ARHGEF1 | ughs.278186:186 | + | 0.01427 | SEQ ID | − | − |
| rho guanine | | | | No: 244 | | |
| nucleotide | | | | (nm_199002) | | |
| exchange factor | | | | | | |
| (gef) 1 | | | | | | |
| ATF2 | ughs.425104:186 | + | 0.0148 | SEQ ID | − | − |
| activating | | | | No: 18 | | |
| transcription | | | | (nm_001880) | | |
| factor 2 | | | | | | |
| TFCP2L1 | ughs.156471:186 | + | 0.0259 | SEQ ID | + | + |
| transcription | | | | No: 121 | | |
| factor cp2-like 1 | | | | (nm_014553) | | |
| IGKC | N_A | + | 0.02767 | SEQ ID | − | − |
| Immunoglobulin | | | | No: 1107 | | |
| kappa variable 1-5 | | | | (BC073775) | | |
| (IGKC) | | | | | | |
| PRSS12 | ughs.445857:186 | + | 0.03118 | SEQ ID | + | − |
| protease, serine, | | | | No: 103 | | |
| 12 (neurotrypsin, | | | | (nm_003619) | | |
| motopsin) | | | | | | |
| IGLC2 | ughs.449585:186 | + | 0.04077 | SEQ ID | + | − |
| immunoglobulin | | | | No: 1118 | | |
| lambda joining 3 | | | | | | |
| CSF1 | ughs.173894:186 | + | 0.0412 | SEQ ID | − | − |
| colony | | | | No: 42 | | |
| stimulating factor | | | | (nm_000757) | | |
| 1 (macrophage) | | | | | | |
| LOC114659 | ughs.406166:186; | + | 0.04453 | SEQ ID | − | − |
| SH3-domain | ughs.438861:186 | | | No: 1067 | | |
| GRB2-like | | | | (AK123784) | | |
| pseudogene 1 | | | | | | |

[0167] Multivariate Cox analysis allowed estimation of parameters corresponding to each of the selected metagenes:

| | Parameter | P value | |
|---|---|---|---|
| Metagene | estimation | (Chi square) | Hazard Ratio |
| OverEGFR | −1.33 | 0.022 | 0.26 |
| UnderEGFR | −2.28 | 0.0048 | 0.10 |

[0168] On the basis of these parameters, the score for prognosis has been established as follows:

Score=−1.33*overEGFR−2.28*underEGFR

[0169] Threshold optimization: the 3^{rd} quartile was selected (cut-off=0.14) associated with a [0.103-0.177] confidence interval, separating patients into two groups of 79% 5years MFS in the good prognosis group and 60% of 5 years MFS in the poor prognosis group (p=0.041, logrank test).

[0170] Model validation: we calculated the score for the 164 patients of the validation set with the formula identified on the training set, and separated the patients according to the defined threshold. The model was well validated (p=1.1 10⁻⁰³, log rank test), with 82% MFS at 5 years in the good prognosis group (76% of patients), and 54% MFS in the poor prognosis group (20% of patients, 5% of patients not interpretable). On a subset of the validation set, constituted of the clinical trial PACS01 (N=128), we obtained similar validation (p=2.9 10⁻⁰³, logrank test) with 87% of 5-year MFS in the good-prognosis group (75% of patients) and 60% of 5-year MFS in the poor-prognosis group (19% of patients, 6% of patients not interpretable).

[0171] Model performances: we performed multivariate analysis to determine the importance of the model as previously.

[0172] Multivariate analysis on the global population (N=347)

| | | Hazard | CI95 | | |
|---|---|---|---|---|---|
| | | ratio | upper | CI95 lower | p |
| Age | <35 y | 1 | 0.17 | 3.09 | p = 0.67 |
| | >=35 y | 0.73 | | | |
| Menopausal | N | 1 | 0.83 | 1.93 | p = 0.27 |
| | Y | 1.27 | | | |
| Tumour size | pT1 | 1 | 0.97 | 2.79 | p = 0.065 |
| | pT2-pT3 | 1.65 | | | |
| N | N− | 1 | 0.73 | 2.64 | p = 0.32 |
| | N+ | 1.39 | | | |
| SBR grade | I | 1 | 1.05 | 5.78 | p = 0.039 |
| | II-III | 2.46 | | | |
| HR (10%) | HR− | 1 | 0.48 | 1.33 | p = 0.4 |
| | HR+ | 0.8 | | | |
| Erbb2 | 0-1-2 | 1 | 0.59 | 1.85 | p = 0.88 |
| | 3 | 1.05 | | | |
| Model | Good | 1 | 1.09 | 2.94 | P = 0.021 |
| | Poor | 1.79 | | | |

[0173] Multivariate analysis on the training set (N=222)

| | | Hazard | CI95 | | |
|---|---|---|---|---|---|
| | | ratio | upper | CI95 lower | p |
| Age | <35 y | 1 | 0.22 | 12.59 | p = 0.62 |
| | >=35 y | 1.67 | | | |
| Menopausal | N | 1 | 0.63 | 1.65 | p = 0.95 |
| | Y | 1.01 | | | |
| Tumour size | pT1 | 1 | 0.63 | 1.97 | p = 0.71 |
| | pT2-pT3 | 1.11 | | | |
| N | N− | 1 | 0.86 | 3.21 | p = 0.13 |
| | N+ | 1.67 | | | |
| SBR grade | I | 1 | 0.95 | 5.46 | p = 0.067 |
| | II-III | 2.27 | | | |
| HR (10%) | HR− | 1 | 0.48 | 1.57 | p = 0.65 |
| | HR+ | 0.87 | | | |
| Erbb2 | 0-1-2 | 1 | 0.4 | 1.77 | p = 0.66 |
| | 3 | 0.85 | | | |
| Model | Good | 1 | 0.73 | 2.38 | P = 0.35 |
| | Poor | 1.32 | | | |

[0174] Multivariate analysis on the PACS01 clinical trial (N=108)

| | | | CI95 | CI95 | |
|---|---|---|---|---|---|
| | | Hazard ratio | upper | lower | p |
| Age | <35 y | 1 | 0 | Inf | p = 1 |
| | >=35 y | 440091063.3 | | | |
| Menopausal | N | 1 | 0.62 | 4.12 | p = 0.34 |
| | Y | 1.59 | | | |
| Tumour size | pT1 | 1 | 0 | Inf | p = 1 |
| | pT2-pT3 | 267234385.6 | | | |
| N | N− | 1 | | | p = NA |
| | N+ | | | | |
| SBR grade | I | 1 | 0 | Inf | p = 1 |
| | II-III | 182875754.1 | | | |
| HR (10%) | HR− | 1 | 0.26 | 3.5 | p = 0.94 |
| | HR+ | 0.95 | | | |
| Erbb2 | 0-1-2 | 1 | 0.65 | 6.1 | p = 0.23 |
| | 3 | 1.99 | | | |
| Model | Good | 1 | 0.96 | 10.02 | P = 0.059 |
| | Poor | 3.09 | | | |

[0175] Metagenes Reduction:

[0176] We optimized the number of genes to analyse in underEGFR and overEGFR signature as described previously for the other metagenes.

[0177] The metagene overEGFR could be reduced from 19 to 12 (Table IV) or 5 genes (Table IV) with a concordancy of 96% and 94% respectively on the validation set.

[0178] Taken with the optimized underEGFR metagene, we obtained a concordancy of 95 and 91% considering 37 (Table III) and 24 genes (Table III) respectively instead of 92.

[0179] Some metagenes could be reduced at the level of a single gene still having a significant prognostic value.

[0180] An example of such a gene-based model contains SCUBE2 (SEQ ID NO: 681) and IGKC (SEQ ID NO: 1107 or 1099). SCUBE2 is an element of underEGFR metagene, while IGKC is part of overEGFR metagene.

| | Parameter | P value | |
|---|---|---|---|
| Metagene | estimation | (Chi square) | Hazard Ratio |
| SCUBE2 | −0.746 | 0.0016 | 0.474 |
| IGKC | −0.463 | 0.037 | 0.629 |

[0181] Threshold optimization: the 3^{rd} quartile (cut-off=0.095), confidence interval [0.0513-0.1387]) was the most significant (p=9.1 10⁻⁰⁴, logrank test) and separated the identification set in a good-prognosis group (77% MFS at 5 years) and a poor-prognosis group (51% MFS at 5 years).

[0182] Model Validation: we used the coefficients and the threshold previously calculated to separate the 164 patients from the validation set into two groups that had statistically significant outcome (p=4 10⁻⁰⁴, logrank test). The good prognosis group had a 5 y MFS of 83% (69% of the patients) while the poor prognosis group had a 5 y MFS of 55% (24% of the patients, 7% of patients not interpretable). On a subset of the validation set, constituted of the clinical trial PACS01 (N=128), we obtained similar validation (p=1.3 10⁻⁰³, logrank test) with 90% of 5-year MFS in the good-prognosis group (69% of patients) and 61% of 5-year MFS in the poor-prognosis group (23% of patients, 7% of patients not interpretable).

[0183] Model performances: we performed multivariate analysis to determine the importance of this simplified model as described previously.

[0184] Multivariate analysis on the global population (N=330)

| | | Hazard | CI95 | | |
|---|---|---|---|---|---|
| | | ratio | upper | CI95 lower | p |
| Age | <35 y | 1 | 0.22 | 3.77 | p = 0.89 |
| | >=35 y | 0.91 | | | |
| Menopausal | N | 1 | 0.78 | 1.85 | p = 0.4 |
| | Y | 1.2 | | | |
| Tumour size | pT1 | 1 | 0.95 | 2.74 | p = 0.079 |
| | pT2-pT3 | 1.61 | | | |
| N | N− | 1 | 0.72 | 2.64 | p = 0.33 |
| | N+ | 1.38 | | | |
| SBR grade | I | 1 | 1 | 5.56 | p = 0.051 |
| | II-III | 2.36 | | | |
| HR (10%) | HR− | 1 | 0.44 | 1.13 | p = 0.15 |
| | HR+ | 0.71 | | | |
| Erbb2 | 0-1-2 | 1 | 0.62 | 1.92 | p = 0.76 |
| | 3 | 1.09 | | | |
| Model | Good | 1 | 1.17 | 2.82 | P = 0.0077 |
| | Poor | 1.82 | | | |

[0185] Multivariate analysis on the training set (N=222)

| | | Hazard | CI95 | | |
|---|---|---|---|---|---|
| | | ratio | upper | CI95 lower | p |
| Age | <35 y | 1 | 0.21 | 11.94 | p = 0.65 |
| | >=35 y | 1.59 | | | |
| Menopausal | N | 1 | 0.61 | 1.6 | p = 0.97 |
| | Y | 0.99 | | | |
| Tumour size | pT1 | 1 | 0.62 | 1.94 | p = 0.75 |
| | pT2-pT3 | 1.1 | | | |
| N | N− | 1 | 0.85 | 3.17 | p = 0.14 |
| | N+ | 1.64 | | | |
| SBR grade | I | 1 | 0.87 | 5.12 | p = 0.098 |
| | II-III | 2.11 | | | |
| HR (10%) | HR− | 1 | 0.52 | 1.59 | p = 0.74 |
| | HR+ | 0.91 | | | |
| Erbb2 | 0-1-2 | 1 | 0.44 | 1.89 | p = 0.8 |
| | 3 | 0.91 | | | |
| Model | Good | 1 | 1.02 | 2.99 | P = 0.043 |
| | Poor | 1.74 | | | |

[0186] Multivariate analysis on the PACS01 clinical trial (N=108)

| | | | |
|---|---|---|---|
| | CI95 | CI95 | |
| Hazard ratio | upper | lower | p |

| | | | | | |
|---|---|---|---|---|---|
| Age | <35 y | 1 | 0.09 | 6.22 | p = 0.77 |
| | >=35 y | 0.73 | | | |
| Menopausal | N | 1 | 0.37 | 2.73 | p = 0.99 |
| | Y | 1.01 | | | |
| Tumour size | pT1 | 1 | 0.79 | 48.7 | p = 0.083 |
| | pT2-pT3 | 6.19 | | | |
| N | N− | 1 | | | p = NA |
| | N+ | | | | |
| SBR grade | I | 1 | 0 | Inf | p = 1 |
| | II-III | 634794463.76 | | | |
| HR (10%) | HR− | 1 | 0.23 | 1.58 | p = 0.3 |
| | HR+ | 0.6 | | | |
| Erbb2 | 0-1-2 | 1 | 0.8 | 6.74 | p = 0.12 |
| | 3 | 2.32 | | | |
| Model | Good | 1 | 1.01 | 6.06 | P = 0.049 |
| | Poor | 2.47 | | | |

[0187] Different nucleic acids array platforms may be used to work the present invention including, but not limited to, cDNA platforms (Image or “Ipso” clones described below), Affymetrix® platforms (GeneChip® probe sets) and others.

### Example 4

### Use of Metagenes Combinations According to the Invention on a cDNA Platform

[0188] The following tables are examples of metagenes of the invention that may be used on a cDNA platform according to the above described methods. For example, the following underER, underPR and underEGFR metagenes may be used in the above described method using a Cox regression analysis and the score S_{C}=−2.90279×underER−1.47423×underPR−4.17198×under EGFR, with the intervals mentioned previously in the description for “a”, “b” and “c” (and similarly for the above described combination involving underEGFR and over EGFR, as well as the IGKC+SCUBE2 combination). The Seq3′ and Seq5′ in the tables below columns provide the sequences identifying the respective Image or Ipso clones.

TABLE V
Metagene UnderER

| Set | Gene | | | | | | Seq | Seq | |
|---|---|---|---|---|---|---|---|---|---|
| No. | symbol | Clone ID | Gene name | Unigene Cluster | Regulation | P value | 3′ | 5′ | Ref. Seq |
| 402 | ITGB3 | ipso:0000143 | integrin, beta 3 | ughs.218040:186 | − | 0.00001 | | SEQ ID No: 992 | SEQ ID No: |
| | | | (platelet | | | | | | 374 |
| | | | glycoprotein iiia, | | | | | | (nm_000212) |
| | | | antigen cd61) | | | | | | |
| 423 | PADI2 | ipso:0000610 | peptidyl arginine | ughs.33455:186 | − | 0.00001 | | SEQ ID | SEQ ID No: 1027 |
| | | | deiminase, type ii | | | | | No: 1026 | (nm_007365) |
| 246 | SOD2 | image:324014 | superoxide | ughs.487046:186 | − | 0.00001 | SEQ ID | | SEQ ID No: 598 |
| | | | dismutase 2, | | | | No: 597 | | (nm_000636) |
| | | | mitochondrial | | | | | | |
| 290 | FLJ13154 | image:43457 | hypothetical protein | ughs.408702:186 | − | 0.00003 | SEQ ID | SEQ ID No: 716 | SEQ ID No: 717 |
| | | | flj13154 | | | | No: 715 | | (nm_024598) |
| 237 | HDAC2 | image:309924 | histone deacetylase 2 | ughs.3352:186 | − | 0.00004 | SEQ ID | SEQ ID No: 572 | SEQ ID No: 573 |
| | | | | | | | No: 571 | | (nm_001527) |
| 34 | SLAC2-B | image:142546 | slac2-b | N_A | − | 0.00006 | | SEQ ID No: 82 | SEQ ID No: 83 |
| | | | | | | | | | (nm_015065) |
| 6 | S100A8 | image:1089513 | s100 calcium | ughs.416073:186 | − | 0.00006 | SEQ ID | | SEQ ID No: 12 |
| | | | binding protein a8 | | | | No: 11 | | (nm_002964) |
| | | | (calgranulin a) | | | | | | |
| 171 | GSTP1 | image:231424 | glutathione s- | ughs.523836:186 | − | 0.00006 | SEQ ID | SEQ ID No: 404 | SEQ ID No: 405 |
| | | | transferase pi | | | | No: 403 | | (nm_000852) |
| 343 | LCN2 | image:544683 | lipocalin 2 | ughs.204238:186 | − | 0.00012 | SEQ ID | SEQ ID No: 855 | SEQ ID No: 856 |
| | | | (oncogene 24p3) | | | | No: 854 | | (nm_005564) |
| 163 | MYBL2 | image:207378 | v-myb | ughs.179718:186 | − | 0.00013 | SEQ ID | SEQ ID No: 383 | SEQ ID No: 384 |
| | | | myeloblastosis viral | | | | No: 382 | | (nm_002466) |
| | | | oncogene homolog | | | | | | |
| | | | (avian)-like 2 | | | | | | |
| 69 | PFKP | image:152714 | phosphofructokinase, | ughs.26010:186 | − | 0.00081 | SEQ ID | SEQ ID No: 166 | SEQ ID No: 167 |
| | | | platelet | | | | No: 165 | | (nm_002627) |
| 152 | STK6 | image:1912132 | serine/threonine | ughs.250822:186 | − | 0.00134 | SEQ ID | | SEQ ID No: 51 |
| | | | kinase 6 | | | | No: 358 | | (nm_198433) |
| 408 | GPR125 | ipso:0000267 | g protein-coupled | ughs.99195:186 | − | 0.00153 | | SEQ ID | SEQ ID No: 999 |
| | | | receptor 125 | | | | | No: 1001 | (nm_145290) |
| 393 | DSCR1 | ipso:0000077 | down syndrome | ughs.282326:186 | − | 0.00206 | | SEQ ID No: 978 | SEQ ID No: 979 |
| | | | critical region gene 1 | | | | | | (nm_004414) |
| 1 | FAT | image:1028762 | fat tumor | ughs.481371:186 | − | 0.0023 | SEQ ID | | SEQ ID No: 2 |
| | | | suppressor homolog | | | | No: 1 | | (nm_005245) |
| | | | 1 (drosophila) | | | | | | |
| 40 | VGLL1 | image:143622 | vestigial like 1 | N_A | − | 0.00247 | SEQ ID | SEQ ID No: 97 | SEQ ID No: 98 |
| | | | (drosophila) | | | | No: 96 | | (nm_016267) |
| 302 | MMP7 | image:471134 | matrix | ughs.2256:186 | − | 0.00264 | SEQ ID | SEQ ID No: 750 | SEQ ID No: 751 |
| | | | metalloproteinase 7 | | | | No: 749 | | (nm_002423) |
| | | | (matrilysin, uterine) | | | | | | |
| 282 | ENO1 | image:392678 | enolase 1, (alpha) | ughs.517145:186 | − | 0.00348 | SEQ ID | | SEQ ID No: 696 |
| | | | | | | | No: 695 | | (nm_001428) |
| 59 | | image:1493187 | cdna clone | ughs.175285:186 | − | 0.00429 | SEQ ID | SEQ ID | SEQ ID No: 1050 |
| | | | image:4831215 | | | | No: 142 | No: 1051 | (BC034638) |
| 203 | SCP2 | image:278490 | sterol carrier protein 2 | ughs.476365:186 | − | 0.00469 | SEQ ID | SEQ ID No: 487 | SEQ ID No: 488 |
| | | | | | | | No: 486 | | (nm_002979) |
| 111 | CEBPB | image:161993 | ccaat/enhancer | ughs.517106:186 | − | 0.00507 | SEQ ID | | SEQ ID No: 262 |
| | | | binding protein | | | | No: 261 | | (nm_005194) |
| | | | (c/ebp), beta | | | | | | |
| 419 | TGM1 | ipso:0000488 | transglutaminase 1 | ughs.508950:186 | − | 0.00695 | | SEQ ID | SEQ ID No: 1020 |
| | | | (k polypeptide | | | | | No: 1019 | (nm_000359) |
| | | | epidermal type i, | | | | | | |
| | | | protein-glutamine- | | | | | | |
| | | | gamma- | | | | | | |
| | | | glutamyltransferase) | | | | | | |
| 418 | | ipso:0000487 | | N_A | − | 0.00764 | | SEQ ID | SEQ ID No: 1106 |
| | | | | | | | | No: 1018 | (BC015969) |
| 380 | GGH | image:809588 | gamma-glutamyl | ughs.78619:186 | − | 0.00881 | SEQ ID | SEQ ID No: 951 | SEQ ID No: 952 |
| | | | hydrolase | | | | No: 950 | | (nm_003878) |
| | | | (conjugase, | | | | | | |
| | | | folylpolygamma- | | | | | | |
| | | | glutamyl hydrolase) | | | | | | |
| 273 | GSTA4 | image:345309 | glutathione s- | ughs.485557:186 | − | 0.00995 | SEQ ID | SEQ ID No: 674 | SEQ ID No: 675 |
| | | | transferase a4 | | | | No: 673 | | (nm_001512) |
| 123 | FN5 | image:171580 | b-cell cll/lymphoma | ughs.438064:186 | − | 0.0109 | SEQ ID | SEQ ID No: 288 | SEQ ID No: 289 |
| | | | 7b | | | | No: 287 | | (nm_020179) |
| 387 | CCNB2 | image:845594 | glutamate | ughs.194698:186 | − | 0.01221 | SEQ ID | | SEQ ID No: 553 |
| | | | decarboxylase 1 | | | | No: 969 | | (nm_004701) |
| | | | (gad 1) | | | | | | |
| 239 | CTSC | image:320656 | cathepsin c | ughs.128065:186 | − | 0.01501 | SEQ ID | SEQ ID No: 578 | SEQ ID No: 579 |
| | | | | | | | No: 577 | | (nm_001814) |
| 305 | PBEF1 | image:488548 | pre-b-cell colony | ughs.489615:186 | − | 0.01621 | SEQ ID | SEQ ID No: 759 | SEQ ID No: 760 |
| | | | enhancing factor 1 | | | | No: 758 | | (nm_005746) |
| 323 | S100A6 | image:512420 | s100 calcium | ughs.275243:186 | − | 0.01719 | SEQ ID | | SEQ ID No: 805 |
| | | | binding protein a6 | | | | No: 804 | | (nm_014624) |
| | | | (calcyclin) | | | | | | |
| 153 | RDX | image:193081 | radixin | ughs.263671:186 | − | 0.01753 | SEQ ID | SEQ ID No: 360 | SEQ ID No: 361 |
| | | | | | | | No: 359 | | (nm_002906) |
| 187 | GPR126 | image:259884 | g protein-coupled | ughs.318894:186 | − | 0.01886 | SEQ ID | SEQ ID No: 447 | SEQ ID No: 448 |
| | | | receptor 126 | | | | No: 446 | | (nm_198569) |
| 70 | MMP15 | image:152744 | matrix | ughs.80343:186 | − | 0.0274 | SEQ ID | SEQ ID No: 169 | SEQ ID No: 170 |
| | | | metalloproteinase | | | | No: 168 | | (nm_002428) |
| | | | 15 (membrane- | | | | | | |
| | | | inserted) | | | | | | |
| 352 | KLK6 | image:724109 | kallikrein 6 | ughs.79361:186 | − | 0.02892 | SEQ ID | SEQ ID No: 877 | SEQ ID No: 878 |
| | | | (neurosin, zyme) | | | | No: 876 | | (nm_002774) |
| 79 | | image: 153978 | | N_A | − | 0.0351 | SEQ ID | SEQ ID No: 190 | SEQ ID No: 1117 |
| | | | | | | | No: 189 | | |
| 251 | BOK | image:325789 | bcl2-related ovarian | ughs.293753:186 | − | 0.03747 | SEQ ID | | SEQ ID No: 612 |
| | | | killer | | | | No: 611 | | (nm_032515) |
| 225 | CDKL5 | image:301018 | cyclin-dependent | ughs.435570:186 | − | 0.03754 | SEQ ID | SEQ ID No: 539 | SEQ ID No: 540 |
| | | | kinase-like 5 | | | | No: 538 | | (nm_003159) |
| 330 | CSTB | image:51814 | cystatin b (stefin b) | ughs.695:186 | − | 0.0382 | SEQ ID | SEQ ID No: 822 | SEQ ID No: 823 |
| | | | | | | | No: 821 | | (nm_000100) |
| 54 | LOC151194 | image:147707 | similar to | ughs.552610:186 | − | 0.03884 | | SEQ ID No: 130 | SEQ ID No: 131 |
| | | | hepatocellular | | | | | | (nm_145280) |
| | | | carcinoma- | | | | | | |
| | | | associated antigen | | | | | | |
| | | | hca557b | | | | | | |
| 285 | NFIB | image:416959 | nuclear factor i/b | ughs.370359:186 | − | 0.03949 | SEQ ID | SEQ ID No: 704 | SEQ ID No: 705 |
| | | | | | | | No: 703 | | (nm_005596) |
| 14 | LAD1 | image:121551 | ladinin 1 | ughs.519035:186 | − | 0.04184 | SEQ ID | SEQ ID No: 30 | SEQ ID No: 31 |
| | | | | | | | No: 29 | | (nm_005558) |
| 83 | MGC11271 | image:154651 | hypothetical protein | ughs.143288:186 | − | 0.04312 | | SEQ ID No: 198 | SEQ ID No: 199 |
| | | | mgc11271 | | | | | | (nm_024323) |

TABLE VI
Metagene underPR

| Set | Gene | | | | | | | | |
|---|---|---|---|---|---|---|---|---|---|
| No. | symbol | Clone ID | Gene name | Unigene Cluster | Regulation | P value | Seq3′ | Seq5′ | Ref. Seq |
| 246 | SOD2 | image:324014 | superoxide | ughs.487046:186 | − | 1E−05 | SED ID | | SED ID No: 598 |
| | | | dismutase 2, | | | | No: 597 | | (nm_000636) |
| | | | mitochondrial | | | | | | |
| 217 | IGHG1 | image:289337 | immunoglobulin | ughs.510635:186 | − | 1E−05 | SED ID | SED ID No: 521 | SED ID No: 1122 |
| | | | heavy constant | | | | No: 520 | | |
| | | | gamma 1 (g1m | | | | | | |
| | | | marker) | | | | | | |
| 154 | KDR | image:193857 | kinase insert domain | ughs.479756:186 | − | 0.0001 | SED ID | SED ID No: 363 | SED ID No: 364 |
| | | | receptor (a type iii | | | | No: 362 | | (nm_002253) |
| | | | receptor tyrosine | | | | | | |
| | | | kinase) | | | | | | |
| 164 | KLF1 | image:208991 | kruppel-like factor 1 | ughs.37860:186 | − | 0.0001 | SEQ ID | SEQ ID No: 386 | SEQ ID No: 387 |
| | | | (erythroid) | | | | No: 385 | | (nm_006563) |
| 15 | CASP9 | image:121693 | caspase 9, | ughs.329502:186 | − | 0.0002 | SEQ ID | SEQ ID No: 33 | SEQ ID No: 34 |
| | | | apoptosis-related | | | | No: 32 | | (nm_001229) |
| | | | cysteine protease | | | | | | |
| 267 | BCL2 | image:342181 | b-cell cll/lymphoma 2 | ughs.150749:186 | − | 0.0002 | SEQ ID | SEQ ID No: 656 | SEQ ID No: 657 |
| | | | | | | | No: 655 | | (nm_000633) |
| 163 | MYBL2 | image:207378 | v-myb | ughs.179718:186 | − | 0.0003 | SEQ ID | SEQ ID No: 383 | SEQ ID No: 384 |
| | | | myeloblastosis viral | | | | No: 382 | | (nm_002466) |
| | | | oncogene homolog | | | | | | |
| | | | (avian)-like 2 | | | | | | |
| 188 | ADAM10 | image:261401 | a disintegrin and | ughs.172028:186 | − | 0.0003 | SEQ ID | SEQ ID No: 450 | SEQ ID No: 451 |
| | | | metalloproteinase | | | | No: 449 | | (nm_001110) |
| | | | domain 10 | | | | | | |
| 406 | GPR125 | ipso:0000252 | g protein-coupled | ughs.99195:186 | − | 0.0003 | | SEQ ID No: 998 | SEQ ID No: 999 |
| | | | receptor 125 | | | | | | (nm_145290) |
| 81 | | image:154483 | | ughs.26192:186 | − | 0.0005 | SEQ ID | SEQ ID | SEQ ID No: 1056 |
| | | | | | | | No: 194 | No: 1055 | (AK126297) |
| 7 | TGFBR3 | image:110287 | transforming growth | ughs.482390:186 | − | 0.0006 | SEQ ID | SEQ ID No: 14 | SEQ ID No: 15 |
| | | | factor, beta receptor | | | | No: 13 | | (nm_003243) |
| | | | iii (betaglycan, | | | | | | |
| | | | 300 kda) | | | | | | |
| 318 | LOC91316 | image:50877 | similar to bk246h3.1 | ughs.407693:186; | − | 0.0007 | SEQ ID | SEQ ID | SEQ ID No: 1090 |
| | | | (immunoglobulin | ughs.148656:186 | | | No: 792 | No: 1088 or | (AK125808) |
| | | | lambda-like | | | | | SEQ ID | |
| | | | polypeptide 1, pre-b- | | | | | No: 1089 | |
| | | | cell specific) | | | | | | |
| 95 | | image:156715 | | ughs.416139:186 | − | 0.0007 | SEQ ID | SEQ ID | SEQ ID No: 1120 |
| | | | | | | | No: 227 | No: 1060 | |
| 6 | S100A8 | image:1089513 | s100 calcium | ughs.416073:186 | − | 0.0008 | SEQ ID | | SEQ ID No: 12 |
| | | | binding protein a8 | | | | No: 11 | | (nm_002964) |
| | | | (calgranulin a) | | | | | | |
| 299 | PIM2 | image:46959 | pim-2 oncogene | ughs.496096:186 | − | 0.0009 | SEQ ID | SEQ ID No: 742 | SEQ ID No: 743 |
| | | | | | | | No: 741 | | (nm_006875) |
| 175 | TP53 | image:236338 | tumor protein p53 | ughs.408312:186 | − | 0.001 | SEQ ID | SEQ ID No: 413 | SEQ ID No: 414 |
| | | | (li-fraumeni | | | | No: 412 | | (nm_000546) |
| | | | syndrome) | | | | | | |
| 404 | ITGB3 | ipso:0000152 | integrin, beta 3 | ughs.218040:186 | − | 0.0012 | | SEQ ID No: 995 | SEQ ID No: 374 |
| | | | (platelet | | | | | | (nm_000212) |
| | | | glycoprotein iiia, | | | | | | |
| | | | antigen cd61) | | | | | | |
| 287 | LAMB1 | image:428443 | laminin, beta 1 | ughs.489646:186 | − | 0.0012 | SEQ ID | SEQ ID No: 710 | SEQ ID No: 711 |
| | | | | | | | No: 709 | | (nm_002291) |
| 269 | SILV | image:342383 | silver homolog | ughs.95972:186 | − | 0.0012 | SEQ ID | SEQ ID No: 662 | SEQ ID No: 663 |
| | | | (mouse) | | | | No: 661 | | (nm_006928) |
| 392 | | ipso:0000040 | cdna flj42596 fis, | ughs.113271:186 | − | 0.0012 | | SEQ ID No: 977 | SEQ ID No: 1102 |
| | | | clone brace3010283 | | | | | | (AK124587) |
| 100 | PIGR | image:159410 | polymeric | ughs.497589:186 | − | 0.0012 | SEQ ID | | SEQ ID No: 237 |
| | | | immunoglobulin | | | | No: 236 | | (nm_002644) |
| | | | receptor | | | | | | |
| 25 | CSH1 | image:133891 | chorionic | ughs.347963:186 | − | 0.0016 | | SEQ ID No: 59 | SEQ ID No: 60 |
| | | | somatomammotropin | | | | | | (nm_022640) |
| | | | hormone 1 | | | | | | |
| | | | (placental lactogen) | | | | | | |
| 153 | RDX | image:193081 | radixin | ughs.263671:186 | − | 0.0018 | SEQ ID | SEQ ID No: 360 | SEQ ID No: 361 |
| | | | | | | | No: 359 | | (nm_002906) |
| 49 | ETF1/FLT1 | image:146976 | eukaryotic | ughs.483494:186; | − | 0.0019 | SEQ ID | | SEQ ID No: 119 |
| | | | translation | ughs.507621:186 | | | No: 118 | | (nm_004730) or |
| | | | termination factor | | | | | | SEQ ID No: 1109 |
| | | | 1/fms-related | | | | | | (NM_002019) |
| | | | tyrosine kinase 1 | | | | | | |
| 69 | PFKP | image:152714 | phosphofructokinase, | ughs.26010:186 | − | 0.0019 | SEQ ID | SEQ ID No: 166 | SEQ ID No: 167 |
| | | | platelet | | | | No: 165 | | (nm_002627) |
| 143 | CXORF38 | image:188005 | chromosome x open | ughs.495961:186 | − | 0.002 | SEQ ID | SEQ ID No: 338 | SEQ ID No: 339 |
| | | | reading frame 38 | | | | No: 337 | | (nm_144970) |
| 140 | MGC15606 | image:187120 | family with | ughs.130195:186 | − | 0.0021 | SEQ ID | SEQ ID No: 332 | SEQ ID No: 333 |
| | | | sequence similarity | | | | No: 331 | | (nm_145037) |
| | | | 55, member c | | | | | | |
| 402 | ITGB3 | ipso:0000143 | integrin, beta 3 | ughs.218040:186 | − | 0.0022 | | SEQ ID No: 992 | SEQ ID No: 374 |
| | | | (platelet | | | | | | (nm_000212) |
| | | | glycoprotein iiia, | | | | | | |
| | | | antigen cd61) | | | | | | |
| 34 | SLAC2-B | image:142546 | slac2-b | N_A | − | 0.0024 | | SEQ ID No: 82 | SEQ ID No: 83 |
| | | | | | | | | | (nm_015065) |
| 139 | FLJ10986 | image:187119 | hypothetical protein | ughs.444301:186; | − | 0.0026 | SEQ ID | SEQ ID No: 329 | SEQ ID No: 330 |
| | | | flj10986 | ughs.439112:186 | | | No: 328 | | (nm_018291) |
| 421 | SERPINB1 | ipso:0000605 | serine (or cysteine) | ughs.381167:186 | − | 0.0037 | | SEQ ID | SEQ ID No: 1024 |
| | | | proteinase inhibitor, | | | | | No: 1023 | (nm_030666) |
| | | | clade b (ovalbumin), | | | | | | |
| | | | member 1 | | | | | | |
| 96 | RPS6KA3 | image:156808 | ribosomal protein s6 | ughs.445387:186 | − | 0.0048 | | SEQ ID No: 228 | SEQ ID No: 229 |
| | | | kinase, 90 kda, | | | | | | (nm_004586) |
| | | | polypeptide 3 | | | | | | |
| 370 | GATA6 | image:771332 | gata binding protein 6 | ughs.514746:186 | − | 0.0049 | SEQ ID | SEQ ID No: 924 | SEQ ID No: 925 |
| | | | | | | | No: 923 | | (nm_005257) |
| 316 | MTIF2 | image:50754 | mitochondrial | ughs.149894:186 | − | 0.0054 | SEQ ID | | SEQ ID No: 788 |
| | | | translational | | | | No: 787 | | (nm_001005369) |
| | | | initiation factor 2 | | | | | | |
| 413 | | ipso:0000376 | | N_A | − | 0.0057 | | SEQ ID | SEQ ID No: 1104 |
| | | | | | | | | No: 1010 | (AK128524) |
| 397 | | ipso:0000119 | | N_A | − | 0.0064 | | SEQ ID No: 985 | SEQ ID No: 1103 |
| | | | | | | | | | (BX108410) |
| 27 | IFNGR1 | image:136478 | interferon gamma | ughs.520414:186 | − | 0.0066 | SEQ ID | SEQ ID No: 65 | SEQ ID No: 66 |
| | | | receptor 1 | | | | No: 64 | | (nm_000416) |
| 425 | EBF | ipso:0000617 | early b-cell factor | ughs.308048:186 | − | 0.0067 | | SEQ ID | SEQ ID No: 1030 |
| | | | | | | | | No: 1029 | (nm_024007) |
| 92 | | image:156283 | | N_A | − | 0.0073 | SEQ ID | SEQ ID No: 222 | SEQ ID No: 1119 |
| | | | | | | | No: 221 | | |
| 148 | p66alpha | image:188422 | GATA zinc finger | ughs.551742:186 | − | 0.0074 | SEQ ID | | SEQ ID No: 1068 |
| | | | domain containing | | | | No: 350 | | (AK024670) |
| | | | 2A (p66alpha) | | | | | | |
| 102 | FKBP1A | image:159521 | fk506 binding | ughs.471933:186 | − | 0.0089 | SEQ ID | SEQ ID No: 240 | SEQ ID No: 241 |
| | | | protein 1a, 12 kda | | | | No: 239 | | (nm_000801) |
| 168 | SNAPC3 | image:219829 | small nuclear rna | ughs.546299:186 | − | 0.0089 | SEQ ID | SEQ ID No: 397 | SEQ ID No: 398 |
| | | | activating complex, | | | | No: 396 | | (nm_003084) |
| | | | polypeptide 3, | | | | | | |
| | | | 50 kda | | | | | | |
| 159 | ITGB3 | image:200209 | integrin, beta 3 | ughs.218040:186 | − | 0.0097 | SEQ ID | | SEQ ID No: 374 |
| | | | (platelet | | | | No: 373 | | (nm_000212) |
| | | | glycoprotein iiia, | | | | | | |
| | | | antigen cd61) | | | | | | |
| 30 | IL2RB | image:139073 | interleukin 2 | ughs.474787:186; | − | 0.0097 | SEQ ID | SEQ ID No: 73 | SEQ ID No: 74 |
| | | | receptor, beta | ughs.555488:186 | | | No: 72 | | (nm_000878) |
| 313 | | image:50541 | Homo sapiens | ughs.535157:186 | − | 0.0097 | SEQ ID | SEQ ID No: 780 | SEQ ID No: 1087 |
| | | | mRNA for FLJ00204 | | | | No: 779 | | (AK074131) |
| | | | protein | | | | | | |
| 381 | ETV4 | image:809959 | ets variant gene 4 | ughs.434059:186 | − | 0.01 | SEQ ID | SEQ ID No: 954 | SEQ ID No: 955 |
| | | | (e1a enhancer | | | | No: 953 | | (nm_001986) |
| | | | binding protein, | | | | | | |
| | | | e1af) | | | | | | |
| 29 | IL1R2 | image:137575 | interleukin 1 | ughs.25333:186 | − | 0.0101 | SEQ ID | SEQ ID No: 70 | SEQ ID No: 71 |
| | | | receptor, type ii | | | | No: 69 | | (nm_004633) |
| 416 | IGHG1 | ipso:0000434 | immunoglobulin | ughs.510635:186 | − | 0.0104 | | SEQ ID | SEQ ID No: 1105 |
| | | | heavy constant | | | | | No: 1015 | (BC072392) |
| | | | gamma 1 (g1m | | | | | | |
| | | | marker) | | | | | | |
| 343 | LCN2 | image:544683 | lipocalin 2 | ughs.204238:186 | − | 0.0107 | SEQ ID | SEQ ID No: 855 | SEQ ID No: 856 |
| | | | (oncogene 24p3) | | | | No: 854 | | (nm_005564) |
| 97 | CMRF35 | image:156937 | cd300c antigen | ughs.2605:186 | − | 0.0112 | | SEQ ID No: 230 | SEQ ID No: 231 |
| | | | | | | | | | (nm_006678) |
| 244 | CXCL1 | image:323238 | chemokine (c—x—c | ughs.789:186 | − | 0.0117 | SEQ ID | SEQ ID No: 592 | SEQ ID No: 593 |
| | | | motif) ligand 1 | | | | No: 591 | | (nm_001511) |
| | | | (melanoma growth | | | | | | |
| | | | stimulating activity, | | | | | | |
| | | | alpha) | | | | | | |
| 353 | MYBL2 | image:724259 | v-myb | ughs.179718:186 | − | 0.0122 | SEQ ID | SEQ ID No: 880 | SEQ ID No: 384 |
| | | | myeloblastosis viral | | | | No: 879 | | (nm_002466) |
| | | | oncogene homolog | | | | | | |
| | | | (avian)-like 2 | | | | | | |
| 216 | SLAMF8 | image:288807 | slam family member 8 | ughs.438683:186 | − | 0.0131 | SEQ ID | SEQ ID No: 518 | SEQ ID No: 519 |
| | | | | | | | No: 517 | | (nm_020125) |
| 239 | CTSC | image:320656 | cathepsin c | ughs.128065:186 | − | 0.016 | SEQ ID | SEQ ID No: 578 | SEQ ID No: 579 |
| | | | | | | | No: 577 | | (nm_001814) |
| 430 | ENPP2 | ipso:0000727 | ectonucleotide | ughs.190977:186 | − | 0.0205 | | SEQ ID | SEQ ID No: 1039 |
| | | | pyrophosphatase/ | | | | | No: 1038 | (nm_006209) |
| | | | phosphodiesterase 2 | | | | | | |
| | | | (autotaxin) | | | | | | |
| 14 | LAD1 | image:121551 | ladinin 1 | ughs.519035:186 | − | 0.021 | SEQ ID | SEQ ID No: 30 | SEQ ID No: 31 |
| | | | | | | | No: 29 | | (nm_005558) |
| 138 | RABL3 | image:186926 | rab, member of ras | ughs.444360:186; | − | 0.0221 | | SEQ ID No: 326 | SEQ ID No: 327 |
| | | | oncogene family-like 3 | ughs.548087:186 | | | | | (nm_173825) |
| 237 | HDAC2 | image:309924 | histone deacetylase 2 | ughs.3352:186 | − | 0.0243 | SEQ ID | SEQ ID No: 572 | SEQ ID No: 573 |
| | | | | | | | No: 571 | | (nm_001527) |
| 40 | VGLL1 | image:143622 | vestigial like 1 | N_A | − | 0.0245 | SEQ ID | SEQ ID No: 97 | SEQ ID No: 98 |
| | | | (drosophila) | | | | No: 96 | | (nm_016267) |
| 94 | npc-a-5 | image:156691 | nasopharyngeal | ughs.510543:186 | − | 0.0259 | SEQ ID | SEQ ID | SEQ ID No: 1059 |
| | | | carcinoma- | | | | No: 226 | No: 1058 | (AK091113) |
| | | | associated antigen | | | | | | |
| | | | npc-a-5 | | | | | | |
| 355 | CDK4 | image:725349 | cyclin-dependent | ughs.95577:186 | − | 0.0262 | SEQ ID | SEQ ID No: 885 | SEQ ID No: 886 |
| | | | kinase 4 | | | | No: 884 | | (nm_000075) |
| 426 | ABCC5 | ipso:0000654 | atp-binding | ughs.368563:186 | − | 0.0262 | | SEQ ID | SEQ ID No: 1032 |
| | | | cassette, sub-family | | | | | No: 1031 | (nm_005688) |
| | | | c (cftr/mrp), member 5 | | | | | | |
| 319 | MGC9913 | image:50892 | hypothetical protein | ughs.23133:186 | − | 0.0271 | SEQ ID | SEQ ID No: 794 | SEQ ID No: 1091 |
| | | | mgc9913 | | | | No: 793 | | (XM_378178) |
| 98 | FUT8 | image:156966 | fucosyltransferase 8 | ughs.118722:186 | − | 0.0283 | SEQ ID | | SEQ ID No: 233 |
| | | | (alpha (1,6) | | | | No: 232 | | (nm_178155) |
| | | | fucosyltransferase) | | | | | | |
| 375 | SFRP1 | image:783700 | secreted frizzled- | ughs.213424:186 | − | 0.0301 | SEQ ID | | SEQ ID No: 938 |
| | | | related protein 1 | | | | No: 937 | | (nm_003012) |
| 112 | ARPC2 | image:162208 | actin related protein | ughs.529303:186 | − | 0.0324 | SEQ ID | | SEQ ID No: 264 |
| | | | 2/3 complex, subunit | | | | No: 263 | | (nm_152862) |
| | | | 2, 34 kda | | | | | | |
| 227 | LILRB2 | image:30470 | leukocyte | ughs.534386:186 | − | 0.0329 | SEQ ID | SEQ ID No: 545 | SEQ ID No: 546 |
| | | | immunoglobulin-like | | | | No: 544 | | (nm_005874) |
| | | | receptor, subfamily | | | | | | |
| | | | b (with tm and itim | | | | | | |
| | | | domains), member 2 | | | | | | |
| 350 | IGKC | image:713852 | immunoglobulin | ughs.449621:186; | − | 0.0346 | SEQ ID | SEQ ID | SEQ ID No: 1099 |
| | | | kappa constant | ughs.546620:186 | | | No: 872 | No: 1097 or | (BC066343) |
| | | | | | | | | SEQ ID | |
| | | | | | | | | No: 1098 | |
| 429 | SN | ipso:0000704 | sialoadhesin | ughs.31869:186 | − | 0.0377 | | SEQ ID | SEQ ID No: 1037 |
| | | | | | | | | No: 1036 | (nm_023068) |
| 229 | C1ORF38 | image:307255 | chromosome 1 open | ughs.10649:186 | − | 0.0378 | SEQ ID | SEQ ID No: 549 | SEQ ID No: 550 |
| | | | reading frame 38 | | | | No: 548 | | (nm_004848) |
| 423 | PADI2 | ipso:0000610 | peptidyl arginine | ughs.33455:186 | − | 0.0418 | | SEQ ID | SEQ ID No: 1027 |
| | | | deiminase, type ii | | | | | No: 1026 | (nm_007365) |
| 410 | MONDOA | ipso:0000314 | mlx interactor | ughs.437153:186 | − | 0.0455 | | SEQ ID | SEQ ID No: 1005 |
| | | | | | | | | No: 1004 | (nm_014938) |
| 329 | TAP1 | image:51782 | transporter 1, atp- | ughs.352018:186; | − | 0.0458 | SEQ ID | SEQ ID No: 819 | SEQ ID No: 820 |
| | | | binding cassette, | ughs.552165:186 | | | No: 818 | | (nm_000593) |
| | | | sub-family b | | | | | | |
| | | | (mdr/tap) | | | | | | |
| 157 | CYP2D6 | image:199680 | cytochrome p450, | ughs.534311:186 | − | 0.047 | | SEQ ID No: 369 | SEQ ID No: 370 |
| | | | family 2, subfamily | | | | | | (nm_000106) |
| | | | d, polypeptide 6 | | | | | | |

TABLE VII
Metagene underEGFR

| | | | | | Reg- | | | | |
|---|---|---|---|---|---|---|---|---|---|
| Set | Gene | | | | ula- | | | | |
| No. | symbol | Clone ID | Gene name | Unigene Cluster | tion | P value | Seq3′ | Seq5′ | Ref. Seq |
| 197 | | image:266500 | LOC255743: | N_A | − | 1E−05 | SEQ ID | | SEQ ID No: 1071 |
| | | | Nephronectin | | | | No: 472 | | (NM_001033047) |
| 107 | LU | image:160656 | lutheran blood group | ughs.155048:186 | − | 1E−05 | SEQ ID | | SEQ ID No: 254 |
| | | | (auberger b antigen | | | | No: 253 | | (nm_005581) |
| | | | included) | | | | | | |
| 3 | TFF1 | image:1075949 | trefoil factor 1 | ughs.162807:186 | − | 1E−05 | SEQ ID | | SEQ ID No: 6 |
| | | | (breast cancer, | | | | No: 5 | | (nm_003225) |
| | | | estrogen-inducible | | | | | | |
| | | | sequence | | | | | | |
| | | | expressed in) | | | | | | |
| 354 | ESR1 | image:725321 | estrogen receptor 1 | ughs.208124:186 | − | 1E−05 | SEQ ID | SEQ ID No: 882 | SEQ ID No: 883 |
| | | | | | | | No: 881 | | (nm_000125) |
| 226 | XBP1 | image:301950 | x-box binding | ughs.437638:186 | − | 1E−05 | SEQ ID | SEQ ID No: 542 | SEQ ID No: 543 |
| | | | protein 1 | | | | No: 541 | | (nm_005080) |
| 275 | SCUBE2 | image:346321 | signal peptide, cub | ughs.523468:186 | − | 1E−05 | SEQ ID | SEQ ID No: 680 | SEQ ID No: 681 |
| | | | domain, egf-like 2 | | | | No: 679 | | (nm_020974) |
| 26 | GATA3 | image:135118 | gata binding protein 3 | ughs.524134:186 | − | 1E−05 | SEQ ID | SEQ ID No: 62 | SEQ ID No: 63 |
| | | | | | | | No: 61 | | (nm_001002295) |
| 31 | GATA3 | image:139076 | gata binding protein 3 | ughs.524134:186 | − | 1E−05 | SEQ ID | SEQ ID No: 76 | SEQ ID No: 63 |
| | | | | | | | No: 75 | | (nm_001002295) |
| 88 | EIF2C3 | image:155341 | eukaryotic | ughs.530333:186 | − | 1E−05 | | SEQ ID No: 211 | SEQ ID No: 212 |
| | | | translation initiation | | | | | | (nm_024852) |
| | | | factor 2c, 3 | | | | | | |
| 309 | C4A | image:491004 | complement | ughs.534847:186 | − | 1E−05 | SEQ ID | SEQ ID No: 771 | SEQ ID No: 635 |
| | | | component 4b, | | | | No: 770 | | (nm_001002029) |
| | | | telomeric | | | | | | |
| 223 | TFF3 | image:298417 | trefoil factor 3 | ughs.82961:186 | − | 1E−05 | SEQ ID | | SEQ ID No: 535 |
| | | | (intestinal) | | | | No: 534 | | (nm_003226) |
| 424 | | ipso:0000614 | | N_A | − | 3E−05 | | SEQ ID | SEQ ID No: 1125 |
| | | | | | | | | No: 1028 | |
| 44 | NAT1 | image:145894 | n-acetyltransferase | ughs.155956:186 | − | 3E−05 | SEQ ID | SEQ ID No: 108 | SEQ ID No: 109 |
| | | | 1 (arylamine n- | | | | No: 107 | | (nm_000662) |
| | | | acetyltransferase) | | | | | | |
| 144 | COL4A2 | image:188193 | collagen, type iv, | ughs.508716:186 | − | 3E−05 | SEQ ID | SEQ ID No: 341 | SEQ ID No: 342 |
| | | | alpha 2 | | | | No: 340 | | (nm_001846) |
| 259 | C4A | image:340753 | complement | ughs.534847:186 | − | 3E−05 | SEQ ID | SEQ ID No: 634 | SEQ ID No: 635 |
| | | | component 4b, | | | | No: 633 | | (nm_001002029) |
| | | | telomeric | | | | | | |
| 371 | RABEP1 | image:772890 | rabaptin, rab gtpase | ughs.551518:186 | − | 3E−05 | SEQ ID | | SEQ ID No: 927 |
| | | | binding effector | | | | No: 926 | | (nm_004703) |
| | | | protein 1 | | | | | | |
| 398 | | ipso:0000125 | | N_A | − | 5E−05 | | SEQ ID No: 986 | SEQ ID No: 1124 |
| 51 | RHOBTB3 | image:147138 | rho-related btb | ughs.445030:186 | − | 6E−05 | SEQ ID | SEQ ID No: 123 | SEQ ID No: 124 |
| | | | domain containing 3 | | | | No: 122 | | (nm_014899) |
| 119 | CASKI | image:166862 | cask interacting | ughs.530863:186; | − | 6E−05 | SEQ ID | | SEQ ID No: 280 |
| | N1/flj12650 | | protein 1 | ughs.470259:186 | | | No: 279 | | (nm_020764) or |
| | | | | | | | | | SEQ ID No: 1110 |
| | | | | | | | | | (NM_024522) |
| 126 | CXXC5 | image:173797 | cxxc finger 5 | ughs.189119:186 | − | 9E−05 | SEQ ID | SEQ ID No: 296 | SEQ ID No: 297 |
| | | | | | | | No: 295 | | (nm_016463) |
| 317 | MAPT | image:50764 | microtubule- | ughs.101174:186 | − | 0.0001 | SEQ ID | SEQ ID No: 790 | SEQ ID No: 791 |
| | | | associated protein | | | | No: 789 | | (nm_016835) |
| | | | tau | | | | | | |
| 87 | MGC24047 | image:155072 | chromosome 1 open | ughs.29190:186 | − | 0.0001 | SEQ ID | SEQ ID No: 209 | SEQ ID No: 210 |
| | | | reading frame 64 | | | | No: 208 | | (nm_178840) |
| 332 | MGC45441 | image:52118 | hypothetical protein | ughs.488337:186 | − | 0.0003 | SEQ ID | | SEQ ID No: 827 |
| | | | mgc45441 | | | | No: 826 | | (nm_152499) |
| 135 | CYP2B6 | image:182295 | Cytochrome P450, | N_A | − | 0.0007 | SEQ ID | SEQ ID No: 320 | SEQ ID No: 1064 |
| | | | family 2, subfamily | | | | No: 319 | | (NM_000767) |
| | | | B, polypeptide 6 | | | | | | |
| 61 | CROCC | image:149567 | ciliary rootlet coiled- | ughs.309403:186; | − | 0.0007 | | SEQ ID No: 146 | SEQ ID No: 147 |
| | | | coil, rootletin | ughs.135718:186 | | | | | (nm_014675) |
| 136 | USP21 | image:183062 | ubiquitin specific | ughs.8015:186 | − | 0.0008 | SEQ ID | SEQ ID No: 322 | SEQ ID No: 323 |
| | | | protease 21 | | | | No: 321 | | (nm_001014443) |
| 43 | TRAF5 | image:145410 | tnf receptor- | ughs.523930:186 | − | 0.0011 | SEQ ID | SEQ ID No: 105 | SEQ ID No: 106 |
| | | | associated factor 5 | | | | No: 104 | | (nm_004619) |
| 75 | GSTM2 | image:153444 | glutathione s- | ughs.279837:186 | − | 0.0013 | | SEQ ID No: 180 | SEQ ID No: 181 |
| | | | transferase m2 | | | | | | (nm_000848) |
| | | | (muscle) | | | | | | |
| 160 | DUSP4 | image:2044325 | dual specificity | ughs.417962:186 | − | 0.0015 | SEQ ID | | SEQ ID No: 376 |
| | | | phosphatase 4 | | | | No: 375 | | (nm_057158) |
| 47 | ASF1A | image:146634 | asf1 anti-silencing | ughs.292316:186 | − | 0.0018 | SEQ ID | | SEQ ID No: 116 |
| | | | function 1 homolog | | | | No: 115 | | (nm_014034) |
| | | | a (s. cerevisiae) | | | | | | |
| 106 | CSF2 | image:1601601 | colony stimulating | ughs.1349:186 | − | 0.0024 | SEQ ID | | SEQ ID No: 252 |
| | | | factor 2 | | | | No: 251 | | (nm_000758) |
| | | | (granulocyte- | | | | | | |
| | | | macrophage) | | | | | | |
| 320 | CLSTN2 | image:50970 | calsyntenin 2 | ughs.158529:186 | − | 0.0025 | SEQ ID | SEQ ID No: 796 | SEQ ID No: 797 |
| | | | | | | | No: 795 | | (nm_022131) |
| 365 | GLI3 | image:767495 | gli-kruppel family | ughs.199338:186 | − | 0.0028 | SEQ ID | | SEQ ID No: 911 |
| | | | member gli3 (greig | | | | No: 910 | | (nm_000168) |
| | | | cephalopolysyndactyly | | | | | | |
| | | | syndrome) | | | | | | |
| 291 | REPS2 | image:43488 | ralbp1 associated | ughs.186810:186; | − | 0.0031 | SEQ ID | SEQ ID No: 719 | SEQ ID No: 720 |
| | | | eps domain | ughs.131188:186 | | | No: 718 | | (nm_004726) |
| | | | containing 2 | | | | | | |
| 356 | GSTM1 | image:73778 | glutathione s- | ughs.301961:186 | − | 0.0031 | SEQ ID | SEQ ID No: 888 | SEQ ID No: 889 |
| | | | transferase m1 | | | | No: 887 | | (nm_000561) |
| 407 | PLAT | ipso:0000253 | plasminogen | ughs.491582:186 | − | 0.0034 | | SEQ ID | SEQ ID No: 250 |
| | | | activator, tissue | | | | | No: 1000 | (nm_000930) |
| 74 | DLG5 | image:153368 | discs, large homolog | ughs.500245:186 | − | 0.0039 | SEQ ID | | SEQ ID No: 179 |
| | | | 5 (drosophila) | | | | No: 178 | | (nm_004747) |
| 315 | FLJ00012 | image:50602 | flj00012 protein | ughs.21051:186 | − | 0.004 | SEQ ID | SEQ ID No: 785 | SEQ ID No: 786 |
| | | | | | | | No: 784 | | (nm_033388) |
| 73 | SIDT2 | image:153205 | sid1 transmembrane | ughs.410977:186 | − | 0.0041 | SEQ ID | | SEQ ID No: 177 |
| | | | family, member 2 | | | | No: 176 | | (nm_015996) |
| 39 | | image:143169 | | N_A | − | 0.0043 | SEQ ID | SEQ ID | SEQ ID No: 1047 |
| | | | | | | | No: 95 | No: 1046 | (BC012900) |
| 128 | BCL9 | image:1756392 | b-cell cll/lymphoma 9 | ughs.415209:186 | − | 0.0043 | SEQ ID | | SEQ ID No: 301 |
| | | | | | | | No: 300 | | (nm_004326) |
| 86 | USP13 | image:155064 | ubiquitin specific | ughs.175322:186 | − | 0.0052 | SEQ ID | SEQ ID No: 206 | SEQ ID No: 207 |
| | | | protease 13 | | | | No: 205 | | (nm_003940) |
| | | | (isopeptidase t-3) | | | | | | |
| 374 | DNALI1 | image:782688 | dynein, axonemal, | ughs.406050:186 | − | 0.0061 | SEQ ID | SEQ ID No: 935 | SEQ ID No: 936 |
| | | | light intermediate | | | | No: 934 | | (nm_003462) |
| | | | polypeptide 1 | | | | | | |
| 367 | FOXC1/ | image:768370 | forkhead box c1/ras | ughs.348883:186; | − | 0.0065 | | SEQ ID No: 915 | SEQ ID No: 916 |
| | RHOB | | homolog gene | ughs.502876:186 | | | | | (nm_001453) or |
| | | | | | | | | | SEQ ID No: 1116 |
| | | | | | | | | | (NM_004040) |
| 62 | | image:149760 | | N_A | − | 0.007 | SEQ ID | SEQ ID No: 149 | SEQ ID No: 1052 |
| | | | | | | | No: 148 | | (BX096026) |
| 345 | GSTM2 | image:664233 | glutathione s- | ughs.279837:186 | − | 0.0079 | SEQ ID | SEQ ID No: 860 | SEQ ID No: 181 |
| | | | transferase m2 | | | | No: 859 | | (nm_000848) |
| | | | (muscle) | | | | | | |
| 66 | KRT18 | image:151663 | keratin 18 | ughs.406013:186 | − | 0.0088 | SEQ ID | SEQ ID No: 158 | SEQ ID No: 159 |
| | | | | | | | No: 157 | | (nm_000224) |
| 340 | | image:52898 | | ughs.548040:186 | − | 0.0089 | SEQ ID | SEQ ID | SEQ ID No: 1096 |
| | | | | | | | No: 847 | No: 1094 or | (AK127274) |
| | | | | | | | | SEQ ID | |
| | | | | | | | | No: 1095 | |
| 13 | DNAJC12 | image:120138 | dnaj (hsp40) | ughs.260720:186 | − | 0.0094 | SEQ ID | SEQ ID No: 27 | SEQ ID No: 28 |
| | | | homolog, subfamily | | | | No: 26 | | (nm_021800) |
| | | | c, member 12 | | | | | | |
| 77 | | image:153617 | cdna flj41270 fis, | ughs.445414:186 | − | 0.0096 | SEQ ID | SEQ ID No: 185 | SEQ ID No: 1054 |
| | | | clone | | | | No: 184 | | (AK123264) |
| | | | bramy2036387 | | | | | | |
| 12 | SPDEF/ | image:1188588 | sam pointed domain | ughs.124299:186; | − | 0.0098 | SEQ ID | SEQ ID No: 24 | SEQ ID No: 25 |
| | c8orf13 | | containing ets | ughs.485158:186 | | | No: 23 | | (nm_012391) or |
| | | | transcription factor/ | | | | | | SEQ ID No: 1108 |
| | | | chromosome 8 open | | | | | | (NM_053279) |
| | | | reading frame 13 | | | | | | |
| 331 | C20ORF23 | image:52103 | chromosome 20 | ughs.101774:186 | − | 0.0102 | SEQ ID | | SEQ ID No: 825 |
| | | | open reading frame | | | | No: 824 | | (nm_024704) |
| | | | 23 | | | | | | |
| 60 | FLJ20366 | image:149549 | hypothetical protein | ughs.390738:186 | − | 0.0128 | SEQ ID | SEQ ID No: 144 | SEQ ID No: 145 |
| | | | flj20366 | | | | No: 143 | | (nm_017786) |
| 204 | COX6C | image:278531 | cytochrome c | ughs.351875:186 | − | 0.014 | SEQ ID | SEQ ID No: 490 | SEQ ID No: 491 |
| | | | oxidase subunit vic | | | | No: 489 | | (nm_004374) |
| 202 | RGS11 | image:277917 | regulator of | ughs.65756:186 | − | 0.0142 | | SEQ ID No: 484 | SEQ ID No: 485 |
| | | | g-protein signalling | | | | | | (nm_003834) |
| | | | 11 | | | | | | |
| 206 | | image:280743 | Hypothetical protein | ughs.508559:186 | − | 0.0148 | SEQ ID | SEQ ID No: 496 | SEQ ID No: 1072 |
| | | | LOC153561 | | | | No: 495 | | (AY007114) |
| 116 | SEMA6B | image:166010 | sema domain, | ughs.465642:186 | − | 0.0157 | SEQ ID | SEQ ID No: 273 | SEQ ID No: 274 |
| | | | transmembrane | | | | No: 272 | | (nm_032108) |
| | | | domain (tm), and | | | | | | |
| | | | cytoplasmic domain, | | | | | | |
| | | | (semaphorin) 6b | | | | | | |
| 109 | AP1G2 | image:161763 | adaptor-related | ughs.343244:186 | − | 0.0171 | SEQ ID | SEQ ID No: 257 | SEQ ID No: 258 |
| | | | protein complex 1, | | | | No: 256 | | (nm_080545) |
| | | | gamma 2 subunit | | | | | | |
| 124 | AKAP8L | image:171679 | a kinase (prka) | ughs.399800:186 | − | 0.0182 | SEQ ID | SEQ ID No: 291 | SEQ ID No: 292 |
| | | | anchor protein 8-like | | | | No: 290 | | (nm_014371) |
| 322 | PRKCBP1 | image:511899 | protein kinase c | ughs.446240:186 | − | 0.0184 | SEQ ID | SEQ ID No: 802 | SEQ ID No: 803 |
| | | | binding protein 1 | | | | No: 801 | | (nm_183047) |
| 120 | GSTM2 | image:166910 | glutathione s- | ughs.279837:186 | − | 0.0186 | SEQ ID | SEQ ID No: 282 | SEQ ID No: 181 |
| | | | transferase m2 | | | | No: 281 | | (nm_000848) |
| | | | (muscle) | | | | | | |
| 105 | PLAT | image:160149 | plasminogen | ughs.491582:186 | − | 0.0196 | SEQ ID | SEQ ID No: 249 | SEQ ID No: 250 |
| | | | activator, tissue | | | | No: 248 | | (nm_000930) |
| 147 | CENTG3 | image:188414 | centaurin, gamma 3 | ughs.195048:186 | − | 0.0205 | SEQ ID | SEQ ID No: 348 | SEQ ID No: 349 |
| | | | | | | | No: 347 | | (nm_031946) |
| 339 | | image:52870 | genomic region on | ughs.159853:186 | − | 0.0246 | SEQ ID | SEQ ID No: 846 | SEQ ID No: 1123 |
| | | | chromosome 1 | | | | No: 1093 | or SEQ ID | |
| | | | | | | | | No: 1092 | |
| 306 | SLC40A1 | image:489218 | solute carrier family | ughs.529285:186 | − | 0.0246 | SEQ ID | SEQ ID No: 762 | SEQ ID No: 763 |
| | | | 40 (iron-regulated | | | | No: 761 | | (nm_014585) |
| | | | transporter), | | | | | | |
| | | | member 1 | | | | | | |
| 183 | CCND2 | image:249688 | cyclin d2 | ughs.376071:186 | − | 0.0272 | SEQ ID | SEQ ID No: 437 | SEQ ID No: 438 |
| | | | | | | | No: 436 | | (nm_001759) |
| 38 | KLHDC2 | image:143060 | kelch domain | N_A | − | 0.028 | SEQ ID | SEQ ID No: 93 | SEQ ID No: 94 |
| | | | containing 2 | | | | No: 92 | | (nm_014315) |
| 338 | ABCA3 | image:52741 | atp-binding | ughs.26630:186 | − | 0.0344 | SEQ ID | SEQ ID No: 844 | SEQ ID No: 845 |
| | | | cassette, sub-family | | | | No: 843 | | (nm_001089) |
| | | | a (abc1), member 3 | | | | | | |
| 293 | LOC143381 | image:44338 | hypothetical protein | ughs.388347:186; | − | 0.0371 | SEQ ID | SEQ ID No: 725 | SEQ ID No: 1084 |
| | | | loc143381 | ughs.557061:186 | | | No: 724 | | (BX648964) |
| 296 | FLJ21439 | image:45814 | hypothetical protein | ughs.550536:186 | − | 0.0375 | SEQ ID | SEQ ID No: 733 | SEQ ID No: 734 |
| | | | flj21439 | | | | No: 732 | | (nm_025137) |
| 377 | HOXA4 | image:785930 | homeo box a4 | ughs.77637:186 | − | 0.039 | SEQ ID | SEQ ID No: 942 | SEQ ID No: 943 |
| | | | | | | | No: 941 | | (nm_002141) |
| 311 | CACNA1D/ | image:49630 | Calcium channel, | ughs.476358:186; | − | 0.0396 | SEQ ID | SEQ ID | SEQ ID No: 1085 |
| | KIF5C | | voltage-dependent, | ughs.435557:186 | | | No: 775 | No: 1086 | (NM_000720) |
| | | | L type, alpha 1D | | | | | | |
| | | | subunit/kinesin | | | | | | |
| | | | famillly member 5c | | | | | | |
| 117 | GNG3 | image:166254 | guanine nucleotide | ughs.179915:186 | − | 0.0494 | | SEQ ID No: 275 | SEQ ID No: 276 |
| | | | binding protein (g | | | | | | (nm_012202) |
| | | | protein), gamma 3 | | | | | | |

TABLE VIII
Metagene overEGFR

| Set | Gene | | | Unigene | Regu- | | | | |
|---|---|---|---|---|---|---|---|---|---|
| No. | symbol | Clone ID | Gene name | Cluster | lation | P value | Seq3′ | Seq5′ | Ref. Seq |
| 171 | GSTP1 | image:231424 | glutathione s- | ughs.523836:186 | + | 0.00005 | SEQ ID | SEQ ID No: 404 | SEQ ID No: 405 |
| | | | transferase pi | | | | No: 403 | | (nm_000852) |
| 402 | ITGB3 | ipso:0000143 | integrin, beta 3 | ughs.218040:186 | + | 0.00008 | | SEQ ID No: 992 | SEQ ID No: 374 |
| | | | (platelet | | | | | | (nm_000212) |
| | | | glycoprotein iiia, | | | | | | |
| | | | antigen cd61) | | | | | | |
| 217 | IGHG1 | image:289337 | immunoglobulin | ughs.510635:186 | + | 0.00011 | SEQ ID | SEQ ID No: 521 | SEQ ID No: 1122 |
| | | | heavy constant | | | | No: 520 | | |
| | | | gamma 1 (g1m | | | | | | |
| | | | marker) | | | | | | |
| 246 | SOD2 | image:324014 | superoxide | ughs.487046:186 | + | 0.00072 | SEQ ID | | SEQ ID No: 598 |
| | | | dismutase 2, | | | | No: 597 | | (nm_000636) |
| | | | mitochondrial | | | | | | |
| 111 | CEBPB | image:161993 | ccaat/enhancer | ughs.517106:186 | + | 0.00089 | SEQ ID | | SEQ ID No: 262 |
| | | | binding protein | | | | No: 261 | | (nm_005194) |
| | | | (c/ebp), beta | | | | | | |
| 350 | IGKC | image:713852 | immunoglobulin | ughs.449621:186; | + | 0.00177 | SEQ ID | SEQ ID | SEQ ID No: 1099 |
| | | | kappa constant | ughs.546620:186 | | | No: 872 | No: 1097 or | (BC066343) |
| | | | | | | | | SEQ ID | |
| | | | | | | | | No: 1098 | |
| 282 | ENO1 | image:392678 | enolase 1, (alpha) | ughs.517145:186 | + | 0.00201 | SEQ ID | | SEQ ID No: 696 |
| | | | | | | | No: 695 | | (nm_001428) |
| 94 | npc-a-5 | image:156691 | nasopharyngeal | ughs.510543:186 | + | 0.00352 | SEQ ID | SEQ ID | SEQ ID No: 1059 |
| | | | carcinoma- | | | | No: 226 | No: 1058 | (AK091113) |
| | | | associated antigen | | | | | | |
| | | | npc-a-5 | | | | | | |
| 302 | MMP7 | image:471134 | matrix | ughs.2256:186 | + | 0.00698 | SEQ ID | SEQ ID No: 750 | SEQ ID No: 751 |
| | | | metalloproteinase 7 | | | | No: 749 | | (nm_002423) |
| | | | (matrilysin, uterine) | | | | | | |
| 142 | | image:187744 | | N_A | + | 0.01196 | | SEQ ID No: 336 | SEQ ID No: 1121 |
| 122 | MKI67 | image:1693709 | antigen identified by | ughs.80976:186 | + | 0.0122 | SEQ ID | | SEQ ID No: 286 |
| | | | monoclonal antibody | | | | No: 285 | | (nm_002417) |
| | | | ki-67 | | | | | | |
| 103 | ARHGEF1 | image:159568 | rho guanine | ughs.278186:186 | + | 0.01427 | SEQ ID | SEQ ID No: 243 | SEQ ID No: 244 |
| | | | nucleotide exchange | | | | No: 242 | | (nm_199002) |
| | | | factor (gef) 1 | | | | | | |
| 8 | ATF2 | image:110999 | activating | ughs.425104:186 | + | 0.0148 | SEQ ID | SEQ ID No: 17 | SEQ ID No: 18 |
| | | | transcription factor 2 | | | | No: 16 | | (nm_001880) |
| 50 | TFCP2L1 | image:1470131 | transcription factor | ughs.156471:186 | + | 0.0259 | SEQ ID | | SEQ ID No: 121 |
| | | | cp2-like 1 | | | | No: 120 | | (nm_014553) |
| 427 | IGKC | ipso:0000658 | immunoglobulin | N_A | + | 0.02767 | | SEQ ID | SEQ ID No: 1107 |
| | | | kappa variable 1-5 | | | | | No: 1033 | (BC073775) |
| | | | (IGKC) | | | | | | |
| 42 | PRSS12 | image:145310 | protease. serine, 12 | ughs.445857:186 | + | 0.03118 | SEQ ID | SEQ ID No: 102 | SEQ ID No: 103 |
| | | | (neurotrypsin, | | | | No: 101 | | (nm_003619) |
| | | | motopsin) | | | | | | |
| 84 | IGLC2 | image:154809 | immunoglobulin | ughs.449585:186 | + | 0.04077 | SEQ ID | SEQ ID No: 201 | SEQ ID No: 1118 |
| | | | lambda joining 3 | | | | No: 200 | | |
| 18 | CSF1 | image:124554 | colony stimulating | ughs.173894:186 | + | 0.0412 | SEQ ID | | SEQ ID No: 42 |
| | | | factor 1 | | | | No: 41 | | (nm_000757) |
| | | | (macrophage) | | | | | | |
| 145 | LOC114659 | image:188196 | SH3-domain GRB2- | ughs.406166:186; | + | 0.04453 | SEQ ID | SEQ ID | SEQ ID No: 1067 |
| | | | like pseudogene 1 | ughs.438861:186 | | | No: 343 | No: 1065 | (AK123784) |
| | | | | | | | (=SEQ ID | | |
| | | | | | | | No: 1066) | | |

### Example 5

### Use of Metagenes According to the Invention on an Affymetrix® Platform (GeneChip® Human Genome U133 Plus 2.0 Array)

[0189] We profiled 113 samples from the validation set on the Affymetrix® platform to evaluate agreement between the 2 platforms.

[0190] A mapping was performed to find the Affymetrix® probesets corresponding to the sequences comprised into the 3 metagenes, using standard sequence alignment (blast) algorithms.

[0191] For a given gene, several Image clones may exist, each of them covering a particular region of the gene, more commonly in the 3′ region. Affymetrix® probesets are also designed to target a specific region of a gene, of around 1000 nucleotides. Clone inserts and Affymetrix® targets do not necessarily overlap, even if the same gene is considered.

[0192] Given this information, there were two possibilities to find a correspondence between Discovery™ and Affymetrix® plateform:

[0193] i) sequence alignment of clone inserts and probesets against a Reference Sequence (ReSeq), which represents a specific gene, and selection of pairs (Clone, Probeset) with homologies to the same Refseq, even if the these sequences do not overlap;

[0194] ii) consider only pairs which overlap, assuming that signal may differ according to the region we focus on. This second approach was chosen to select Affymetrix® probe sets corresponding to the Discovery clones.

[0195] Raw data from Affymetrix® platform were first normalized using the RMA (Robust Multichip Average) method available in Bioconductor (Irizarry et al. 2 . . . ) (Affymetrix® package), then corrected to take into account the inter-platform effect and calculate the score for each sample. The data processing applied was the same as previously described on the Discovery™ platform for normalization and Metagenes calculation.

[0196] As an example, comparing sample classification into good or poor prognosis group on Discovery™ and Affymetrix® platform, we obtained 95% when using appropriate confidence interval around the threshold.

[0197] The following tables (IX to XIV) are examples of metagenes of the invention that may be used with an Affymetrix® platform according to the above described methods. For each metagene (IX to XIV), at least two, preferably five, most preferably ten or all of the markers listed, e.g., genes, or marker-derived polynucleotides, e.g., Affymetrix® Probe Sets, may be used to perform these methods. The sequences of the listed Affymetrix® Probe Sets are provided in the enclosed sequence listing and are also publicly available from internet, e.g., www.affymetrix.com. For example, these underER, underPR and underEGFR metagenes may be used in the above described method using a Cox regression analysis and the score S_{C}=a×underER+b×underPR+c×under EGFR, wherein “a” is comprised in the interval [−6.26; +0.49], “b” is comprised in the interval [−2.65; +0.29] and “c” is comprised in the interval [−6.69; +1.65]. For example the formula is: S_{C}=−2.90279×underER−1.47423×underPR−4.17198×under EGFR. Preferably, metagenes of tables IX to XI are used together one the one hand, and metagenes of tables XII to XIV are used together on the other hand.

[0198] The error on the score was integrated by calculating a confidence interval around the threshold, within which sample classification was considered non robust. Considering the score distribution Gaussian, we estimated the confidence interval around the threshold using standard deviation calculation method (estimated standard deviation of the population/√n).

[0199] The inventors have established that a woman having a score (S_{C}) of more than 0.16 have at least a double propensity of poor clinical outcome than a woman with a score (S_{C}) of less than 0.015.

TABLE IX
Metagene underER

| Affymetrix ® | | | | | Reference sequence | |
|---|---|---|---|---|---|---|
| Probe Set | Clone | Gene | symbol | Unigene Reference | (refseq) | genbank |
| 213094_at | image:259884 | G protein-coupled receptor 126 | GPR126 | hs.318894 | nm_001032394, | al033377 |
| | | | | | nm_001032395, | |
| | | | | | nm_020455, | |
| | | | | | nm_198569 | |
| 204259_at | image:471134 | matrix metallopeptidase | MMP7 | hs.2256 | nm_002423 | nm_002423 |
| | | 7_matrilysin, uterine_{—} | | | | |
| 204733_at | image:724109 | kallikrein 6_neurosin, zyme_{—} | KLK6 | hs.79361 | nm_001012964, | nm_002774 |
| | | | | | nm_001012965, | |
| | | | | | nm_001012966, | |
| | | | | | nm_002774 | |
| 203560_at | image:809588 | gamma-glutamyl | GGH | hs.78619 | nm_003878 | nm_003878 |
| | | hydrolase_conjugase, | | | | |
| | | folylpolygammaglutamyl | | | | |
| | | hydrolase_{—} | | | | |
| 202705_at | image:845594 | cyclin B2 | CCNB2 | hs.194698 | nm_004701 | nm_004701 |
| 227004_at | image:301018 | Cyclin-dependent kinase-like 5 | CDKL5 | hs.435570 | nm_003159 | ai611074 |
| 202967_at | image:345309 | glutathione S-transferase A4 | GSTA4 | hs.485557 | nm_001512 | nm_001512 |
| 218060_s_at | image:43457 | hypothetical protein FLJ13154 | FLJ13154 | hs.408702 | nm_024598 | nm_024598 |
| 201579_at | image:1028762 | FAT tumor suppressor homolog | FAT | hs.481371 | nm_005245 | nm_005245 |
| | | 1_Drosophila_{—} | | | | |
| 208370_s_at | ipso:0000077 | Down syndrome critical region | DSCR1 | hs.282326 | nm_004414, | nm_004414 |
| | | gene 1 | | | nm_203417, | |
| | | | | | nm_203418 | |
| 225565_at | image:147707 | CDNA FLJ34215 fis, clone | NA | hs.516646 | — | aa769455 |
| | | FCBBF3021985 | | | | |
| 217728_at | image:512420 | S100 calcium binding protein | S100A6 | hs.275243 | nm_014624 | nm_014624 |
| | | A6_calcyclin_{—} | | | | |
| 236449_at | image:51814 | Cystatin B_stefin B_{—} | CSTB | hs.695 | nm_000100 | ai885390 |
| 212501_at | image:161993 | CCAAT_enhancer binding | CEBPB | hs.517106 | nm_005194 | al564683 |
| | | protein_C_EBP_, beta | | | | |
| 201487_at | image:320656 | cathepsin C | CTSC | hs.128065 | nm_001814, | nm_001814 |
| | | | | | nm_148170 | |
| 203287_at | image:121551 | ladinin 1 | LAD1 | hs.519035 | nm_005558 | nm_005558 |
| 212531_at | image:544683 | lipocalin 2_oncogene 24p3_{—} | LCN2 | hs.204238 | nm_005564 | nm_005564 |
| 212397_at | image:193081 | radixin | RDX | hs.263671 | nm_002906 | al137751 |
| 202917_s_at | image:1089513 | S100 calcium binding protein | S100A8 | hs.416073 | nm_002964 | nm_002964 |
| | | A8_calgranulin A_{—} | | | | |
| 205487_s_at | image:143622 | vestigial like 1_Drosophila_{—} | VGLL1 | hs.496843 | nm_016267 | nm_016267 |
| 221477_s_at | image:324014 | hypothetical protein MGC5618 | MGC5618 | NA | — | bf575213 |
| 201037_at | image:152714 | phosphofructokinase, platelet | PFKP | hs.26010 | nm_002627 | nm_002627 |

TABLE X
Metagene underPR

| | | | | | Reference | |
|---|---|---|---|---|---|---|
| Affymetrix ® | | | | Unigene | Sequence | |
| Probe Set | Clone | Gene | symbol | reference | (refseq) | genbank |
| 201487_at | image:320656 | cathepsin C | CTSC | hs.128065 | nm_001814, | nm_001814 |
| | | | | | nm_148170 | |
| 203287_at | image:121551 | ladinin 1 | LAD1 | hs.519035 | nm_005558 | nm_005558 |
| 212531_at | image:544683 | lipocalin 2_oncogene 24p3_{—} | LCN2 | hs.204238 | nm_005564 | nm_005564 |
| 212397_at | image:193081 | radixin | RDX | hs.263671 | nm_002906 | al137751 |
| 202917_s_at | image:1089513 | S100 calcium binding protein | S100A8 | hs.416073 | nm_002964 | nm_002964 |
| | | A8_calgranulin A_{—} | | | | |
| 205487_s_at | image:143622 | vestigial like 1_Drosophila_{—} | VGLL1 | hs.496843 | nm_016267 | nm_016267 |
| 221477_s_at | image:324014 | hypothetical protein MGC5618 | MGC5618 | NA | — | bf575213 |
| 201037_at | image:152714 | phosphofructokinase, platelet | PFKP | hs.26010 | nm_002627 | nm_002627 |
| 202603_at | image:261401 | ADAM metallopeptidase | ADAM10 | hs.172028 | nm_001110 | n51370 |
| | | domain 10 | | | | |
| 210785_s_at | image:307255 | chromosome 1 open reading | C1orf38 | hs.10649 | nm_004848 | ab035482 |
| | | frame 38 | | | | |
| 219386_s_at | image:288807 | SLAM family member 8 | SLAMF8 | hs.438683 | nm_020125 | nm_020125 |
| 203988_s_at | image:156966 | fucosyltransferase 8_alpha_1, | FUT8 | hs.118722 | nm_004480, | nm_004480 |
| | | 6_fucosyltransferase_{—} | | | nm_178154, | |
| | | | | | nm_178155, | |
| | | | | | nm_178156, | |
| | | | | | nm_178157 | |
| 202307_s_at | image:51782 | transporter 1, ATP-binding | TAP1 | hs.352018 | nm_000593 | nm_000593 |
| | | cassette, sub-family | | | | |
| | | B_MDR_TAP_{—} | | | | |
| 210465_s_at | image:219829 | small nuclear RNA activating | SNAPC3 | hs.546299 | nm_003084 | u71300 |
| | | complex, polypeptide 3, 50 kDa | | | | |
| 207498_s_at | image:199680 | cytochrome P450, family 2, | CYP2D6 | hs.534311 | nm_000106, | nm_000106 |
| | | subfamily D, polypeptide 6 | | | nm_001025161 | |
| 215370_at | ipso:0000040 | NA | NA | NA | — | au145394 |
| 209212_s_at | image:208991 | Kruppel-like factor 5_intestinal_{—} | KLF5 | hs.508234 | nm_001730 | ab030824 |
| 219336_s_at | image:50892 | activating signal cointegrator 1 | ASCC1 | hs.500007 | nm_015947 | nm_015947 |
| | | complex subunit 1 | | | | |
| 200709_at | image:159521 | FK506 binding protein 1A, | FKBP1A | hs.471933 | nm_000801, | nm_000801 |
| | | 12 kDa | | | nm_054014 | |
| 229659_s_at | image:159410 | Polymeric immunoglobulin | PIGR | hs.497589 | nm_002644 | be501712 |
| | | receptor | | | | |
| 213572_s_at | ipso:0000605 | serpin peptidase inhibitor, clade | SERPINB1 | hs.381167 | nm_030666 | ai554300 |
| | | B_ovalbumin_, member 1 | | | | |
| 203095_at | image:50754 | mitochondrial translational | MTIF2 | hs.149894 | nm_001005369, | nm_002453 |
| | | initiation factor 2 | | | nm_002453 | |
| 240385_at | image:771332 | GATA binding protein 6 | GATA6 | hs.514746 | nm_005257 | bf002339 |
| 243011_at | image:187120 | family with sequence similarity | FAM55C | hs.130195 | nm_145037 | bf317081 |
| | | 55, member C | | | | |
| 207004_at | image:342181 | B-cell CLL_lymphoma 2 | BCL2 | hs.150749 | nm_000633, | nm_000657 |
| | | | | | nm_000657 | |
| 219718_at | image:187119 | hypothetical protein FLJ10986 | FLJ10986 | hs.444301 | nm_018291 | nm_018291 |
| 202122_s_at | image:188005 | mannose-6-phosphate receptor | M6PRBP1 | hs.140452 | nm_005817 | nm_005817 |
| | | binding protein 1 | | | | |
| 211372_s_at | image:137575 | interleukin 1 receptor, type II | IL1R2 | hs.25333 | nm_004633, | u64094 |
| | | | | | nm_173343 | |
| 220529_at | image:154483 | hypothetical protein FLJ11710 | FLJ11710 | NA | — | nm_024846 |
| 207988_s_at | image:162208 | actin related protein 2_3 | ARPC2 | hs.529303 | nm_005731, | nm_005731 |
| | | complex, subunit 2, 34 kDa | | | nm_152862 | |
| 211430_s_at | image:289337 | immunoglobulin heavy | IGH@_ | hs.510635 | — | m87789 |
| | | locus immunoglobulin | IGHG1 | | | |
| | | heavy | IGHG2 | | | |
| | | constant gamma 1_G1m | IGHG3 | | | |
| | | marker_ immunoglobulin | IGHM | | | |
| | | heavy constant gamma 2_G2m | | | | |
| | | marker immunoglobulin heavy | | | | |
| | | constant gamma 3_G3m | | | | |
| | | marker immunoglobulin heavy | | | | |
| | | constant mu | | | | |
| 220616_at | image:156691 | NA | NA | NA | — | nm_006448 |
| 213502_x_at | image:50877 | similar to | LOC91316 | hs.407693 | xm_498877 | aa398569 |
| | | bK246H3.1_immunoglobulin | | | | |
| | | lambda-like | | | | |
| | | polypeptide 1, pre-B-cell | | | | |
| | | specific_{—} | | | | |

TABLE XI
Metagene underEGFR

| Affymetrix ® | | | | Unigene | Reference | |
|---|---|---|---|---|---|---|
| Probe Set | Clone | Gene | symbol | reference | Sequence (refseq) | Genbank |
| 214440_at | image:145894 | N-acetyltransferase 1_arylamine | NAT1 | hs.155956 | nm_000662 | nm_000662 |
| | | N- | | | | |
| | | acetyltransferase_{—} | | | | |
| 232889_at | image:280743 | hypothetical protein | LOC153561 | NA | nm_207331 | au147591 |
| | | LOC153561 | | | | |
| 219414_at | image:50970 | calsyntenin 2 | CLSTN2 | hs.158529 | nm_022131 | nm_022131 |
| 223044_at | image:489218 | solute carrier family 40_iron- | SLC40A1 | hs.529285 | nm_014585 | al136944 |
| | | regulated transporter_, member 1 | | | | |
| 229381_at | image:155072 | chromosome 1 open reading | C1orf64 | hs.29190 | nm_178840 | ai732488 |
| | | frame 64 | | | | |
| 219197_s_at | image:346321 | signal peptide, CUB domain, | SCUBE2 | hs.523468 | nm_020974 | ai424243 |
| | | EGF-like 2 | | | | |
| 225379_at | image:50764 | microtubule-associated protein | MAPT | hs.101174 | nm_005910, | aa199717 |
| | | tau | | | nm_016834, | |
| | | | | | nm_016835, | |
| | | | | | nm_016841 | |
| 219570_at | image:52103 | chromosome 20 open reading | C20orf23 | hs.101774 | nm_024704 | nm_024704 |
| | | frame 23 | | | | |
| 225789_at | image:188414 | centaurin, gamma 3 | CENTG3 | hs.195048 | nm_031946 | be876194 |
| 219438_at | image:166862 | family with sequence similarity | FAM77C | hs.470259 | nm_024522 | nm_024522 |
| | | 77, member C | | | | |
| 204352_at | image:145410 | TNF receptor-associated factor 5 | TRAF5 | hs.523930 | nm_001033910, | nm_004619 |
| | | | | | nm_004619, | |
| | | | | | nm_145759 | |
| 228994_at | image:52118 | coiled-coil domain containing | CCDC24 | hs.488337 | nm_152499 | au153816 |
| | | 24 | | | | |
| 204550_x_at | image:73778 | glutathione S-transferase M1 | GSTM1 | hs.301961 | nm_000561, | nm_000561 |
| | | | | | nm_146421 | |
| 204623_at | image:298417 | trefoil factor 3_intestinal_{—} | TFF3 | hs.82961 | nm_003226 | nm_003226 |
| 222005_s_at | image:166254 | guanine nucleotide binding | GNG3 | hs.179915 | nm_012202 | al538966 |
| | | protein_G protein_, gamma 3 | | | | |
| 220192_x_at | image:1188588 | SAM pointed domain containing | SPDEF | hs.485158 | nm_012391 | nm_012391 |
| | | ets transcription factor | | | | |
| 218064_s_at | image:171679 | A kinase_PRKA_anchor | AKAP8L | hs.399800 | nm_014371 | nm_014371 |
| | | protein 8-like | | | | |
| 40093_at | image:160656 | Lutheran blood group_Auberger | LU | hs.155048 | nm_001013257, | x83425 |
| | | b antigen included_{—} | | | nm_005581 | |
| 203428_s_at | image:146634 | ASF1 anti-silencing function 1 | ASF1A | hs.292316 | nm_014034 | ab028628 |
| | | homolog A_S. cerevisiae_{—} | | | | |
| 204129_at | image:1756392 | B-cell CLL_lymphoma 9 | BCL9 | hs.415209 | nm_004326 | nm_004326 |
| 224182_x_at | image:166010 | sema domain, transmembrane | SEMA6B | hs.465642 | nm_020241, | af293363 |
| | | domain_TM_, and cytoplasmic | | | nm_032108, | |
| | | domain,_semaphorin_6B | | | nm_133327 | |
| 204418_x_at | image:166910 | glutathione S-transferase M2_muscle_{—} | GSTM2 | hs.279837 | nm_000848 | nm_000848 |
| 201681_s_at | image:153368 | discs, large homolog 5_Drosophila_{—} | DLG5 | hs.500245 | nm_004747 | ab011155 |
| 233955_x_at | image:173797 | CXXC finger 5 | CXXC5 | hs.189119 | nm_016463 | ak001782 |
| 205225_at | image:725321 | estrogen receptor 1 | ESR1 | hs.208124 | nm_000125 | nm_000125 |
| 205201_at | image:767495 | GLI-Kruppel family member | GLI3 | hs.199338 | nm_000168 | nm_000168 |
| | | GLI3_Greig | | | | |
| | | cephalopolysyndactyly | | | | |
| | | syndrome_{—} | | | | |
| 209049_s_at | image:511899 | protein kinase C binding protein 1 | PRKCBP1 | hs.446240 | nm_012408, | bc001004 |
| | | | | | nm_183047, | |
| | | | | | nm_183048 | |
| 218367_x_at | image:183062 | ubiquitin specific peptidase 21 | USP21 | hs.8015 | nm_001014443, | nm_012475 |
| | | | | | nm_012475 | |
| 212099_at | image:768370 | ras homolog gene family, | RHOB | hs.502876 | nm_004040 | ai263909 |
| | | member B | | | | |
| 201613_s_at | image:161763 | adaptor-related protein complex | AP1G2 | hs.343244 | nm_003917, | bc000519 |
| | | 1, gamma 2 subunit | | | nm_080545 | |
| 201754_at | image:278531 | cytochrome c oxidase subunit | COX6C | hs.351875 | nm_004374 | nm_004374 |
| | | VIc | | | | |
| 222282_at | image:155064 | Ubiquitin specific peptidase | USP13 | hs.175322 | nm_003940 | av761453 |
| | | 13_isopeptidase | | | | |
| | | T-3_{—} | | | | |
| 208451_s_at | image:340753 | complement component 4A | C4A C4B | hs.534847 | nm_000592, | nm_000592 |
| | | complement component 4B | | | nm_001002029, | |
| | | complement component 4B, | | | nm_007293 | |
| | | telomeric | | | | |
| 214428_x_at | image:491004 | complement component 4A | C4A C4B | hs.534847 | nm_000592, | k02403 |
| | | complement component 4B | | | nm_001002029, | |
| | | complement component 4B, | | | nm_007293 | |
| | | telomeric | | | | |
| 219426_at | image:155341 | eukaryotic translation initiation | EIF2C3 | hs.567761 | nm_024852, | nm_024852 |
| | | factor 2C, 3 | | | nm_177422 | |
| 209604_s_at | image:139076 | GATA binding protein 3 | GATA3 | hs.524134 | nm_001002295, | bc003070 |
| | | | | | nm_002051 | |
| 201596_x_at | image:151663 | keratin 18 | KRT18 | hs.406013 | nm_000224, | nm_000224 |
| | | | | | nm_199187 | |

TABLE XII
Metagene underER

| Affymetrix ® | | | | | Reference Sequence | |
|---|---|---|---|---|---|---|
| Probe Set | Clone | Gene | symbol | Unigene reference | (refseq) | Genbank |
| 200824_at | image:231424 | glutathione S-transferase pi | GSTP1 | Hs.523836 | NM_000852 | NM_000852 |
| 201037_at | image:152714 | phosphofructokinase, platelet | PFKP | Hs.26010 | NM_002627 | NM_002627 |
| 201201_at | image:51814 | cystatin B (stefin B) | CSTB | Hs.695 | NM_000100 | NM_000100 |
| 201231_s_at | image:392678 | enolase 1, (alpha) | ENO1 | Hs.517145 | NM_001428 | NM_001428 |
| 201487_at | image:320656 | cathepsin C | CTSC | Hs.128065 | NM_001814 | NM_001814 |
| 201579_at | image:1028762 | FAT tumor suppressor homolog | FAT | Hs.481371 | NM_005245 | NM_005245 |
| | | 1 (Drosophila) | | | | |
| 201710_at | image:207378 | v-myb myeloblastosis viral | MYBL2 | Hs.179718 | NM_002466 | NM_002466 |
| | | oncogene homolog (avian)-like 2 | | | | |
| 202705_at | image:845594 | cyclin B2 | CCNB2 | Hs.194698 | NM_004701 | NM_004701 |
| 202967_at | image:345309 | glutathione S-transferase A4 | GSTA4 | Hs.485557 | NM_001512 | NM_001512 |
| 203256_at | ipso:0000143 | cadherin 3, type 1, P-cadherin | CDH3 | Hs.461074 | NM_001793 | NM_001793 |
| | | (placental) | | | | |
| 203287_at | image:121551 | ladinin 1 | LAD1 | Hs.519035 | NM_005558 | NM_005558 |
| 203560_at | image:809588 | gamma-glutamyl hydrolase | GGH | Hs.78619 | NM_003878 | NM_003878 |
| | | (conjugase, | | | | |
| | | folylpolygammaglutamyl | | | | |
| | | hydrolase) | | | | |
| 204092_s_at | image:1912132 | aurora kinase A | AURKA | Hs.250822 | NM_003600 | NM_003600 |
| 204259_at | image:471134 | matrix metallopeptidase 7 | MMP7 | Hs.2256 | NM_002423 | NM_002423 |
| | | (matrilysin, uterine) | | | | |
| 204733_at | image:724109 | kallikrein-related peptidase 6 | KLK6 | Hs.79361 | NM_001012964 | NM_002774 |
| 208370_s_at | ipso:0000077 | regulator of calcineurin 1 | RCAN1 | Hs.282326 | NM_004414 | NM_004414 |
| 208456_s_at | image:278490 | related RAS viral (r-ras) | RRAS2 | Hs.502004 | NM_012250 | NM_012250 |
| | | oncogene homolog 2 | | | | |
| 209791_at | ipso:0000610 | peptidyl arginine deiminase, | PADI2 | Hs.33455 | NM_007365 | AL049569 |
| | | type II | | | | |
| 210453_x_at | ipso:0000267 | ATP synthase, H+ transporting, | ATP5L | Hs.486360 | NM_006476 | AL050277 |
| | | mitochondrial F0 complex, | | | | |
| | | subunit G | | | | |
| 212398_at | image:193081 | radixin | RDX | Hs.263671 | NM_002906 | AI057093 |
| 212501_at | image:161993 | CCAAT/enhancer binding | CEBPB | Hs.517106 | NM_005194 | AL564683 |
| | | protein (C/EBP), beta | | | | |
| 212531_at | image:544683 | lipocalin 2 (oncogene 24p3) | LCN2 | Hs.204238 | NM_005564 | NM_005564 |
| 213094_at | image:259884 | G protein-coupled receptor 126 | GPR126 | Hs.318894 | NM_001032394 | AL033377 |
| 214370_at | image:1089513 | S100 calcium binding protein | S100A8 | Hs.416073 | NM_002964 | AW238654 |
| | | A8 | | | | |
| 215223_s_at | image:324014 | superoxide dismutase 2, | SOD2 | Hs.487046 | NM_000636 | W46388 |
| | | mitochondrial | | | | |
| 215729_s_at | image:143622 | vestigial like 1 (Drosophila) | VGLL1 | Hs.496843 | NM_016267 | BE542323 |
| 217728_at | image:512420 | S100 calcium binding protein | S100A6 | Hs.275243 | NM_014624 | NM_014624 |
| | | A6 | | | | |
| 218060_s_at | image:43457 | chromosome 16 open reading | C16orf57 | Hs.588873 | NM_024598 | NM_024598 |
| | | frame 57 | | | | |
| 221477_s_at | ipso:0000488 | hypothetical protein MGC5618 | MGC5618 | NA | NA | BF575213 |

TABLE XIII
Metagene underPR

| Affymetrix ® | | | | Unigene | Reference Sequence | |
|---|---|---|---|---|---|---|
| Probe Set | Clone | Gene | symbol | reference | (refseq) | Genbank |
| 201487_at | image:320656 | cathepsin C | CTSC | Hs.128065 | NM_001814 | NM_001814 |
| 201505_at | image:428443 | laminin, beta 1 | LAMB1 | Hs.650585 | NM_002291 | NM_002291 |
| 201710_at | image:207378 | v-myb myeloblastosis viral | MYBL2 | Hs.179718 | NM_002466 | NM_002466 |
| | | oncogene homolog (avian)-like 2 | | | | |
| 201710_at | image:724259 | v-myb myeloblastosis viral | MYBL2 | Hs.179718 | NM_002466 | NM_002466 |
| | | oncogene homolog (avian)-like 2 | | | | |
| 202036_s_at | image:783700 | secreted frizzled-related protein 1 | SFRP1 | Hs.213424 | NM_003012 | AF017987 |
| 202246_s_at | image:725349 | cyclin-dependent kinase 4 | CDK4 | Hs.95577 | NM_000075 | NM_000075 |
| 202307_s_at | image:51782 | transporter 1, ATP-binding | TAP1 | Hs.352018 | NM_000593 | NM_000593 |
| | | cassette, sub-family B | | | | |
| | | (MDR/TAP) | | | | |
| 202519_at | image:159783 | MLX interacting protein | MLXIP | Hs.437153 | NM_014938 | NM_014938 |
| 203095_at | image:50754 | mitochondrial translational | MTIF2 | Hs.149894 | NM_001005369 | NM_002453 |
| | | initiation factor 2 | | | | |
| 203256_at | ipso:0000143 | cadherin 3, type 1, P-cadherin | CDH3 | Hs.461074 | NM_001793 | NM_001793 |
| | | (placental) | | | | |
| 203287_at | image:121551 | ladinin 1 | LAD1 | Hs.519035 | NM_005558 | NM_005558 |
| 203685_at | image:342181 | B-cell CLL/lymphoma 2 | BCL2 | Hs.150749 | NM_000633 | NM_000633 |
| 203934_at | image:193857 | kinase insert domain receptor | KDR | Hs.479756 | NM_002253 | NM_002253 |
| | | (a type III receptor tyrosine | | | | |
| | | kinase) | | | | |
| 204470_at | image:323238 | chemokine (C—X—C motif) ligand | CXCL1 | Hs.789 | NM_001511 | NM_001511 |
| | | 1 (melanoma growth stimulating | | | | |
| | | activity, alpha) | | | | |
| 204628_s_at | image:200209 | integrin, beta 3 (platelet | ITGB3 | Hs.218040 | NM_000212 | NM_000212 |
| | | glycoprotein IIIa, antigen CD61) | | | | |
| 205890_s_at | ipso:0000252 | ubiquitin D | UBD | Hs.44532 | NM_006398 | NM_006398 |
| 206324_s_at | image:156808 | death-associated protein kinase 2 | DAPK2 | Hs.237886 | NM_014326 | NM_014326 |
| 206792_x_at | image:219829 | phosphodiesterase 4C, cAMP- | PDE4C | Hs.631628 | NM_000923 | NM_000923 |
| | | specific (phosphodiesterase E1 | | | | |
| | | dunce homolog, Drosophila) | | | | |
| 207270_x_at | image:156937 | CD300c molecule | CD300C | Hs.2605 | NM_006678 | NM_006678 |
| 207498_s_at | image:199680 | cytochrome P450, family 2, | CYP2D6 | Hs.648256 | NM_000106 | NM_000106 |
| | | subfamily D, polypeptide 6 | | | | |
| 207571_x_at | image:307255 | chromosome 1 open reading | C1orf38 | Hs.10649 | NM_001039477 | NM_004848 |
| | | frame 38 | | | | |
| 209138_x_at | ipso:0000434 | immunoglobulin lambda locus | IGL@ | Hs.449585 | NA | M87790 |
| 209791_at | ipso:0000610 | peptidyl arginine deiminase, | PADI2 | Hs.33455 | NM_007365 | AL049569 |
| | | type II | | | | |
| 209848_s_at | image:342383 | silver homolog (mouse) | SILV | Hs.95972 | NM_006928 | U01874 |
| 210002_at | image:771332 | GATA binding protein 6 | GATA6 | Hs.514746 | NM_005257 | D87811 |
| 211372_s_at | image:137575 | interleukin 1 receptor, type II | IL1R2 | Hs.25333 | NM_004633 | U64094 |
| 211430_s_at | image:289337 | immunoglobulin heavy constant | IGHG3 | Hs.510635 | NA | M87789 |
| | | gamma 3 (G3m marker) | | | | |
| 212398_at | image:193081 | radixin | RDX | Hs.263671 | NM_002906 | AI057093 |
| 212531_at | image:544683 | lipocalin 2 (oncogene 24p3) | LCN2 | Hs.204238 | NM_005564 | NM_005564 |
| 213572_s_at | ipso:0000605 | serpin peptidase inhibitor, clade | SERPINB1 | Hs.381167 | NM_030666 | AI554300 |
| | | B (ovalbumin), member 1 | | | | |
| 214370_at | image:1089513 | S100 calcium binding protein | S100A8 | Hs.416073 | NM_002964 | AW238654 |
| | | A8 | | | | |
| 215223_s_at | image:324014 | superoxide dismutase 2, | SOD2 | Hs.487046 | NM_000636 | W46388 |
| | | mitochondrial | | | | |
| 215729_s_at | image:143622 | vestigial like 1 (Drosophila) | VGLL1 | Hs.496843 | NM_016267 | BE542323 |
| 215946_x_at | image:50877 | similar to omega protein | CTA-246H3.1 | Hs.567636 | NM_001013618 | AL022324 |
| 216598_s_at | ipso:0000152 | chemokine (C-C motif) ligand 2 | CCL2 | Hs.303649 | NM_002982 | S69738 |
| 217865_at | image:186926 | ring finger protein 130 | RNF130 | Hs.484363 | NM_018434 | NM_018434 |
| 219386_s_at | image:288807 | SLAM family member 8 | SLAMF8 | Hs.438683 | NM_020125 | NM_020125 |
| 221651_x_at | image:156691 | immunoglobulin kappa constant | IGKC | Hs.449621 | NA | BC005332 |
| 221671_x_at | ipso:0000376 | immunoglobulin kappa constant | IGKC | Hs.449621 | NA | M63438 |
| 224795_x_at | image:713852 | immunoglobulin kappa constant | IGKC | Hs.449621 | NA | AW575927 |
| 227262_at | image:187120 | hyaluronan and proteoglycan | HAPLN3 | Hs.447530 | NM_178232 | BE348293 |
| | | link protein 3 | | | | |
| 243209_at | image:156966 | potassium voltage-gated | KCNQ4 | Hs.473058 | NM_004700 | BF725804 |
| | | channel, KQT-like subfamily, | | | | |
| | | member 4 | | | | |

TABLE XIV
Metagene underEGFR

| Affymetrix ® | | | | Unigene | Reference Sequence | |
|---|---|---|---|---|---|---|
| Probe Set | Clone | Gene | symbol | reference | (refseq) | Genbank |
| 200670_at | ipso:0000125 | X-box binding protein 1 | XBP1 | Hs.437638 | NM_005080 | NM_001079539 |
| 200670_at | image:301950 | X-box binding protein 1 | XBP1 | Hs.437638 | NM_005080 | NM_001079539 |
| 201596_x_at | image:151663 | keratin 18 | KRT18 | Hs.406013 | NM_000224 | NM_000224 |
| 201613_s_at | image:161763 | adaptor-related protein complex | AP1G2 | Hs.343244 | BC000519 | NM_003917 |
| | | 1, gamma 2 subunit | | | | |
| 201681_s_at | image:153368 | discs, large homolog 5 | DLG5 | Hs.654780 | AB011155 | NM_004747 |
| | | (Drosophila) | | | | |
| 201754_at | image:278531 | cytochrome c oxidase subunit | COX6C | Hs.351875 | NM_004374 | NM_004374 |
| | | VIc | | | | |
| 201860_s_at | image:160149 | plasminogen activator, tissue | PLAT | Hs.491582 | NM_000930 | NM_000930 |
| 201860_s_at | ipso:0000253 | plasminogen activator, tissue | PLAT | Hs.491582 | NM_000930 | NM_000930 |
| 204129_at | image:1756392 | B-cell CLL/lymphoma 9 | BCL9 | Hs.415209 | NM_004326 | NM_004326 |
| 204352_at | image:145410 | TNF receptor-associated factor 5 | TRAF5 | Hs.523930 | NM_004619 | NM_001033910 |
| 204418_x_at | image:166910 | glutathione S-transferase M2 | GSTM2 | Hs.279837 | NM_000848 | NM_000848 |
| | | (muscle) | | | | |
| 204418_x_at | image:153444 | glutathione S-transferase M2 | GSTM2 | Hs.279837 | NM_000848 | NM_000848 |
| | | (muscle) | | | | |
| 204418_x_at | image:664233 | glutathione S-transferase M2 | GSTM2 | Hs.279837 | NM_000848 | NM_000848 |
| | | (muscle) | | | | |
| 204550_x_at | image:73778 | glutathione S-transferase M1 | GSTM1 | Hs.301961 | NM_000561 | NM_000561 |
| 204623_at | image:298417 | trefoil factor 3 (intestinal) | TFF3 | Hs.82961 | NM_003226 | NM_003226 |
| 205009_at | image:1075949 | trefoil factor 1 | TFF1 | Hs.162807 | NM_003225 | NM_003225 |
| 205186_at | image:782688 | dynein, axonemal, light | DNALI1 | Hs.406050 | NM_003462 | NM_003462 |
| | | intermediate chain 1 | | | | |
| 205201_at | image:767495 | GLI-Kruppel family member | GLI3 | Hs.21509 | NM_000168 | NM_000168 |
| | | GLI3 (Greig | | | | |
| | | cephalopolysyndactyly | | | | |
| | | syndrome) | | | | |
| 205225_at | image:725321 | estrogen receptor 1 | ESR1 | Hs.208124 | NM_000125 | NM_000125 |
| 206107_at | image:277917 | regulator of G-protein signaling | RGS11 | Hs.65756 | NM_003834 | NM_003834 |
| | | 11 | | | | |
| 206289_at | image:785930 | homeobox A4 | HOXA4 | Hs.654466 | NM_002141 | NM_002141 |
| 206401_s_at | image:50764 | microtubule-associated protein | MAPT | Hs.101174 | J03778 | NM_005910 |
| | | tau | | | | |
| 208451_s_at | image:340753 | complement component 4A | C4A | Hs.655564 | NM_000592 | NM_007293 |
| | | (Rodgers blood group) | | | | |
| 208451_s_at | image:491004 | complement component 4A | C4A | Hs.655564 | NM_000592 | NM_007293 |
| | | (Rodgers blood group) | | | | |
| 209048_s_at | image:511899 | zinc finger, MYND-type | ZMYND8 | Hs.446240 | AB032951 | NM_012408 |
| | | containing 8 | | | | |
| 209604_s_at | image:139076 | GATA binding protein 3 | GATA3 | Hs.524134 | BC003070 | NM_001002295 |
| 209604_s_at | ipso:0000286 | GATA binding protein 3 | GATA3 | Hs.524134 | BC003070 | NM_001002295 |
| 210108_at | image:49630 | calcium channel, voltage- | CACNA1D | Hs.476358 | BE550599 | NM_000720 |
| | | dependent, L type, alpha 1D | | | | |
| | | subunit | | | | |
| 210272_at | image:182295 | cytochrome P450, family 2, | CYP2B7P1 | Hs.529117 | M29873 | NR_001278 |
| | | subfamily B, polypeptide 7 | | | | |
| | | pseudogene 1 | | | | |
| 211038_s_at | image:149567 | ciliary rootlet coiled-coil, | CROCCL1 | Hs.631865 | BC006312 | XM_001130627 |
| | | rootletin-like 1 | | | | |
| 212099_at | image:768370 | ras homolog gene family, | RHOB | Hs.502876 | AI263909 | NM_004040 |
| | | member B | | | | |
| 212099_at | image:149760 | ras homolog gene family, | RHOB | Hs.502876 | AI263909 | NM_004040 |
| | | member B | | | | |
| 214440_at | image:145894 | N-acetyltransferase 1 | NAT1 | Hs.591847 | NM_000662 | NM_000662 |
| | | (arylamine N-acetyltransferase) | | | | |
| 218064_s_at | image:171679 | A kinase (PRKA) anchor protein | AKAP8L | Hs.399800 | NM_014371 | NM_014371 |
| | | 8-like | | | | |
| 218211_s_at | image:155341 | melanophilin | MLPH | Hs.102406 | NM_024101 | NM_001042467 |
| 218692_at | image:149549 | Golgi-localized protein | GOLSYN | Hs.390738 | NM_017786 | NM_001099743 |
| 219197_s_at | image:346321 | signal peptide, CUB domain, | SCUBE2 | Hs.523468 | AI424243 | NM_020974 |
| | | EGF-like 2 | | | | |
| 219438_at | image:166862 | family with sequence similarity | FAM77C | Hs.470259 | NM_024522 | NM_024522 |
| | | 77, member C | | | | |
| 219570_at | image:52103 | chromosome 20 open reading | C20orf23 | Hs.101774 | NM_024704 | NM_024704 |
| | | frame 23 | | | | |
| 220192_x_at | image:1188588 | SAM pointed domain containing | SPDEF | Hs.485158 | NM_012391 | NM_012391 |
| | | ets transcription factor | | | | |
| 220778_x_at | image:52741 | sema domain, transmembrane | SEMA6B | Hs.465642 | NM_020241 | NM_020241 |
| | | domain (TM), and cytoplasmic | | | | |
| | | domain, (semaphorin) 6B | | | | |
| 222005_s_at | image:166254 | guanine nucleotide binding | GNG3 | Hs.179915 | AL538966 | NM_012202 |
| | | protein (G protein), gamma 3 | | | | |
| 223044_at | image:489218 | solute carrier family 40 (iron- | SLC40A1 | Hs.643005 | AL136944 | NM_014585 |
| | | regulated transporter), member 1 | | | | |
| 223721_s_at | image:120138 | DnaJ (Hsp40) homolog, | DNAJC12 | Hs.260720 | AF176013 | NM_021800 |
| | | subfamily C, member 12 | | | | |
| 224516_s_at | image:173797 | CXXC finger 5 | CXXC5 | Hs.189119 | BC006428 | NM_016463 |
| 225092_at | image:772890 | nucleoporin 88 kDa | NUP88 | Hs.584784 | AL550977 | NM_002532 |
| 225883_at | image:50602 | ATG16 autophagy related 16- | ATG16L2 | Hs.653186 | AK024423 | NM_033388 |
| | | like 2 (S. cerevisiae) | | | | |
| 225911_at | image:266500 | nephronectin | NPNT | Hs.518921 | AL138410 | NM_001033047 |
| 226362_at | image:280743 | small EDRK-rich factor 1A | SERF1A | Hs.658079 | AI198515 | NM_021967 |
| | | (telomeric) | | | | |
| 226373_at | image:147138 | sideroflexin 5 | SFXN5 | Hs.368171 | AW166098 | NM_144579 |
| 226506_at | image:160656 | thrombospondin, type I, domain | THSD4 | Hs.387057 | AI742570 | NM_024817 |
| | | containing 4 | | | | |
| 227425_at | image:43488 | RALBP1 associated Eps | REPS2 | Hs.186810 | AI984607 | NM_001080975 |
| | | domain containing 2 | | | | |
| 227515_at | image:188414 | STAM binding protein | STAMBP | Hs.469018 | AU158421 | NM_006463 |
| 227550_at | image:44338 | hypothetical protein | LOC143381 | Hs.388347 | AW242720 | NA |
| | | LOC143381 | | | | |
| 227811_at | image:146634 | FYVE, RhoGEF and PH | FGD3 | Hs.411081 | AK000004 | NM_001083536 |
| | | domain containing 3 | | | | |
| 228528_at | image:153617 | NA | NA | NA | AI927692 | NA |
| 228994_at | image:52118 | coiled-coil domain containing | CCDC24 | Hs.632394 | AU153816 | NM_152499 |
| | | 24 | | | | |
| 229150_at | ipso:0000614 | melanophilin | MLPH | Hs.102406 | AI810764 | NM_001042467 |
| 229381_at | image:155072 | chromosome 1 open reading | C1orf64 | Hs.29190 | AI732488 | NM_178840 |
| | | frame 64 | | | | |

[0200] The above described protocol for finding a correspondence between a cDNA platform (e.g., Discovery™) and another platform (e.g., Affymetrix®) may be similarly applied by a person skilled in the art for the other metagenes according to the present invention.

1-89. (canceled)

90. A method of assessing the clinical outcome of a female mammal suffering from breast cancer, comprising the steps of:
a) generating a metagene adjusted value underER by comparing the expression level, in a biological sample from said female mammal and in a control, of at least 10 nucleic acid sequences selected in the group comprising or consisting of: SEQ ID No:374 (nm_{—}000212), SEQ ID No:1027 (nm_{—}007365), SEQ ID No:598 (nm_{—}000636), SEQ ID No:717 (nm_{—}024598), SEQ ID No:573 (nm_{—}001527), SEQ ID No:83 (nm_{—}015065), SEQ ID No:12 (nm_{—}002964), SEQ ID No:405 (nm_{—}000852), SEQ ID No:856 (nm_{—}005564), SEQ ID No:384 (nm_{—}002466), SEQ ID No:167 (nm_{—}002627), SEQ ID No:51 (nm_{—}198433), SEQ ID No:999 (nm_{—}145290), SEQ ID No:979 (nm_{—}004414), SEQ ID No:2 (nm_{—}005245), SEQ ID No:98 (nm_{—}016267), SEQ ID No:751 (nm_{—}002423), SEQ ID No:696 (nm_{—}001428), SEQ ID No:1050 (BC034638), SEQ ID No:488 (nm_{—}002979), SEQ ID No:262 (nm_{—}005194), SEQ ID No:1020 (nm_{—}000359), SEQ ID No:1106 (BC015969), SEQ ID No:952 (nm_{—}003878), SEQ ID No:675 (nm_{—}001512), SEQ ID No:289 (nm_{—}020179), SEQ ID No:553 (nm_{—}004701), SEQ ID No:579 (nm_{—}001814), SEQ ID No:760 (nm_{—}005746), SEQ ID No:805 (nm_{—}014624), SEQ ID No:361 (nm_{—}002906), SEQ ID No:448 (nm_{—}198569), SEQ ID No:170 (nm_{—}002428), SEQ ID No:878 (nm_{—}002774), SEQ ID No:1117, SEQ ID No:612 (nm_{—}032515), SEQ ID No:540 (nm_{—}003159), SEQ ID No:823 (nm_{—}000100), SEQ ID No:131 (nm_{—}145280), SEQ ID No:705 (nm_{—}005596), SEQ ID No:31 (nm_{—}005558), and SEQ ID No:199 (nm_{—}024323) fragments, derivatives or complementary sequences thereof;
b) generating a metagene adjusted value underPR by comparing the expression level, in a biological sample from said female mammal and in a control, of at least 6 nucleic acid sequences selected in the group comprising or consisting of: SEQ ID No:598 (nm_{—}000636), SEQ ID No:1122, SEQ ID No:364 (nm_{—}002253), SEQ ID No:387 (nm_{—}006563), SEQ ID No:34 (nm_{—}001229), SEQ ID No:657 (nm_{—}000633), SEQ ID No:384 (nm_{—}002466), SEQ ID No:451 (nm_{—}001110), SEQ ID No:999 (nm_{—}145290), SEQ ID No:1056 (AK126297), SEQ ID No:15 (nm_{—}003243), SEQ ID No:1090 (AK125808), SEQ ID No:1120, SEQ ID No:12 (nm_{—}002964), SEQ ID No:743 (nm_{—}006875), SEQ ID No:414 (nm_{—}000546), SEQ ID No:374 (nm_{—}000212), SEQ ID No:711 (nm_{—}002291), SEQ ID No:663 (nm_{—}006928), SEQ ID No:1102 (AK124587), SEQ ID No:237 (nm_{—}002644), SEQ ID No:60 (nm_{—}022640), SEQ ID No:361 (nm_{—}002906), SEQ ID No:119 (nm_{—}004730) (or SEQ ID No:1109 (NM_{—}002019)), SEQ ID No:167 (nm_{—}002627), SEQ ID No:339 (nm_{—}144970), SEQ ID No:333 (nm_{—}145037), SEQ ID No:83 (nm_{—}015065), SEQ ID No:330 (nm_{—}018291), SEQ ID No:1024 (nm_{—}030666), SEQ ID No:229 (nm_{—}004586), SEQ ID No:925 (nm_{—}005257), SEQ ID No:788 (nm_{—}001005369), SEQ ID No:1104 (AK128524), SEQ ID No:1103 (BX108410), SEQ ID No:66 (nm_{—}000416), SEQ ID No:1030 (nm_{—}024007), SEQ ID No:1119, SEQ ID No:1068 (AK024670), SEQ ID No:241 (nm_{—}000801), SEQ ID No:398 (nm_{—}003084), SEQ ID No:74 (nm_{—}000878), SEQ ID No:1087 (AK074131), SEQ ID No:955 (nm_{—}001986), SEQ ID No:71 (nm_{—}004633), SEQ ID No:1105 (BC072392), SEQ ID No:856 (nm_{—}005564), SEQ ID No:231 (nm_{—}006678), SEQ ID No:593 (nm_{—}001511), SEQ ID No:384 (nm_{—}002466), SEQ ID No:519 (nm_{—}020125), SEQ ID No:579 (nm_{—}001814), SEQ ID No:1039 (nm_{—}006209), SEQ ID No:31 (nm_{—}005558), SEQ ID No:327 (nm_{—}173825), SEQ ID No:573 (nm_{—}001527), SEQ ID No:98 (nm_{—}016267), SEQ ID No:1059 (AK091113), SEQ ID No:886 (nm_{—}000075), SEQ ID No:1032 (nm_{—}005688), SEQ ID No:1091 (XM_{—}378178), SEQ ID No:233 (nm_{—}178155), SEQ ID No:938 (nm_{—}003012), SEQ ID No:264 (nm_{—}152862), SEQ ID No:546 (nm_{—}005874), SEQ ID No:1099 (BC066343) SEQ ID No:1037 (nm_{—}023068), SEQ ID No:550 (nm_{—}004848), SEQ ID No:1027 (nm_{—}007365), SEQ ID No:1005 (nm_{—}014938), SEQ ID No:820 (nm_{—}000593), and SEQ ID No:370 (nm_{—}000106), fragments, derivatives or complementary sequences thereof;
c) generating a metagene adjusted value underEGFR by comparing the level, in a biological sample from said female mammal and in a control, of at least 10 nucleic acid sequences selected in the group comprising or consisting of: SEQ ID No:1071 (NM_{—}001033047), SEQ ID No:254 (nm_{—}005581), SEQ ID No:6 (nm_{—}003225), SEQ ID No:883 (nm_{—}000125), SEQ ID No:543 (nm_{—}005080), SEQ ID No:681 (nm_{—}020974), SEQ ID No:63 (nm_{—}001002295), SEQ ID No:212 (nm_{—}024852), SEQ ID No:635 (nm_{—}001002029), SEQ ID No:535 (nm_{—}003226), SEQ ID No:1125, SEQ ID No:109 (nm_{—}000662), SEQ ID No:342 (nm_{—}001846), SEQ ID No:927 (nm_{—}004703), SEQ ID No:1124, SEQ ID No:124 (nm_{—}014899), SEQ ID No:280 (nm_{—}020764) (or SEQ ID No:1110 (NM_{—}024522)), SEQ ID No:297 (nm_{—}016463), SEQ ID No:791 (nm_{—}016835), SEQ ID No:210 (nm_{—}178840), SEQ ID No:827 (nm_{—}152499), SEQ ID No:1064 (NM_{—}000767), SEQ ID No:147 (nm_{—}014675), SEQ ID No:323 (nm_{—}001014443), SEQ ID No:106 (nm_{—}004619), SEQ ID No:181 (nm_{—}000848), SEQ ID No:376 (nm_{—}057158), SEQ ID No:116 (nm_{—}014034), SEQ ID No:252 (nm_{—}000758), SEQ ID No:797 (nm_{—}022131), SEQ ID No:911 (nm_{—}000168), SEQ ID No:720 (nm_{—}004726), SEQ ID No:889 (nm_{—}000561), SEQ ID No:250 (nm_{—}000930), SEQ ID No:179 (nm_{—}004747), SEQ ID No:786 (nm_{—}033388), SEQ ID No:177 (nm_{—}015996), SEQ ID No:1047 (BC012900), SEQ ID No:301 (nm_{—}004326), SEQ ID No:207 (nm_{—}003940), SEQ ID No:936 (nm_{—}003462), SEQ ID No:916 (nm_{—}001453) (or SEQ ID No:1116 (NM_{—}004040)), SEQ ID No:1052 (BX096026), SEQ ID No:159 (nm_{—}000224), SEQ ID No:1096 (AK127274), SEQ ID No:28 (nm_{—}021800), SEQ ID No:1054 (AK123264), SEQ ID No:25 (nm_{—}012391) (or SEQ ID No:1108 (NM_{—}053279)), SEQ ID No:825 (nm_{—}024704), SEQ ID No:145 (nm_{—}017786), SEQ ID No:491 (nm_{—}004374), SEQ ID No:485 (nm_{—}003834), SEQ ID No:1072 (AY007114), SEQ ID No:274 (nm_{—}032108), SEQ ID No:258 (nm_{—}080545), SEQ ID No:292 (nm_{—}014371), SEQ ID No:803 (nm_{—}183047), SEQ ID No:349 (nm_{—}031946), SEQ ID No:1123, SEQ ID No:763 (nm_{—}014585), SEQ ID No:438 (nm_{—}001759), SEQ ID No:94 (nm_{—}014315), SEQ ID No:845 (nm_{—}001089), SEQ ID No:1084 (BX648964), SEQ ID No:734 (nm_{—}025137), SEQ ID No:943 (nm_{—}002141), SEQ ID No:1085 (NM_{—}000720), and SEQ ID No:276 (nm_{—}012202), fragments, derivatives or complementary sequences thereof;
d) generating a score (S_{C}) from said metagene adjusted values using a mathematical method establishing a relation between the combined metagene values and the clinical outcome of said female mammal.

91. The method of claim 90, wherein said metagene adjusted value underER is generated by comparing the expression level, in a biological sample from said female mammal and in a control, of the 20 nucleic acid sequences selected in the group consisting of: SEQ ID No:374 (nm_{—}000212); SEQ ID No:1027 (nm_{—}007365); SEQ ID No:598 (nm_{—}000636); SEQ ID No:573 (nm_{—}001527); SEQ ID No:83 (nm_{—}015065); SEQ ID No:12 (nm_{—}002964); SEQ ID No:405 (nm_{—}000852); SEQ ID No:856 (nm_{—}005564); SEQ ID No:167 (nm_{—}002627); SEQ ID No:51 (nm_{—}198433); SEQ ID No:98 (nm_{—}016267); SEQ ID No:751 (nm_{—}002423); SEQ ID No:696 (nm_{—}001428); SEQ ID No:262 (nm_{—}005194); SEQ ID No:1020 (nm_{—}000359); SEQ ID No:579 (nm_{—}001814); SEQ ID No:760 (nm_{—}005746); SEQ ID No:805 (nm_{—}014624); SEQ ID No:878 (nm_{—}002774); and SEQ ID No:612 (nm_{—}032515), fragments, derivatives or complementary sequences thereof.

92. The method of claim 90, wherein said metagene adjusted value underER is generated by comparing the expression level, in a biological sample from said female mammal and in a control, of the 27 nucleic acid sequences selected in the group consisting of: SEQ ID No:374 (nm_{—}000212); SEQ ID No:1027 (nm_{—}007365); SEQ ID No:598 (nm_{—}000636); SEQ ID No:573 (nm_{—}001527); SEQ ID No:83 (nm_{—}015065); SEQ ID No:12 (nm_{—}002964); SEQ ID No:405 (nm_{—}000852); SEQ ID No:856 (nm_{—}005564); SEQ ID No:167 (nm_{—}002627); SEQ ID No:51 (nm_{—}198433); SEQ ID No:98 (nm_{—}016267); SEQ ID No:751 (nm_{—}002423); SEQ ID No:696 (nm_{—}001428); SEQ ID No:262 (nm_{—}005194); SEQ ID No:1020 (nm_{—}000359); SEQ ID No:579 (nm_{—}001814); SEQ ID No:760 (nm_{—}005746); SEQ ID No:805 (nm_{—}014624); SEQ ID No:878 (nm_{—}002774); SEQ ID No:612 (nm_{—}032515); SEQ ID No:384 (nm_{—}002466); SEQ ID No:2 (nm_{—}005245); SEQ ID No:1050 (BC034638); SEQ ID No:952 (nm_{—}003878); SEQ ID No:361 (nm_{—}002906); SEQ ID No:31 (nm_{—}005558); and SEQ ID No:199 (nm_{—}024323), fragments, derivatives or complementary sequences thereof.

93. The method of claim 90, wherein said metagene adjusted value underPR is generated by comparing the expression level, in a biological sample from said female mammal and in a control, of the 6 nucleic acid sequences selected in the group consisting of: SEQ ID No:364 (nm_{—}002253); SEQ ID No:34 (nm_{—}001229); SEQ ID No:657 (nm_{—}000633); SEQ ID No:339 (nm_{—}144970); SEQ ID No:229 (nm_{—}004586); SEQ ID No:1119, fragments, derivatives or complementary sequences thereof.

94. The method of claim 90, wherein said metagene adjusted value underPR is generated by comparing the expression level, in a biological sample from said female mammal and in a control, of the 36 nucleic acid sequences selected in the group consisting of: SEQ ID No:364 (nm_{—}002253); SEQ ID No:34 (nm_{—}001229); SEQ ID No:657 (nm_{—}000633); SEQ ID No:339 (nm_{—}144970); SEQ ID No:229 (nm_{—}004586); SEQ ID No:1119; SEQ ID No:387 (nm_{—}006563); SEQ ID No:1056 (AK126297); SEQ ID No:15 (nm_{—}003243); SEQ ID No:1120; SEQ ID No:414 (nm_{—}000546); SEQ ID No:374 (nm_{—}000212); SEQ ID No:711 (nm_{—}002291); SEQ ID No:663 (nm_{—}006928); SEQ ID No:237 (nm_{—}002644); SEQ ID No:60 (nm_{—}022640); SEQ ID No:119 (nm_{—}004730); SEQ ID No:330 (nm_{—}018291); SEQ ID No:1024 (nm_{—}030666); SEQ ID No:925 (nm_{—}005257); SEQ ID No:1104 (AK128524); SEQ ID No:1103 (BX108410); SEQ ID No:66 (nm_{—}000416); SEQ ID No:1068 (AK024670); SEQ ID No:374 (nm_{—}000212); SEQ ID No:74 (nm_{—}000878); SEQ ID No:231 (nm_{—}006678); SEQ ID No:593 (nm_{—}001511); SEQ ID No:384 (nm_{—}002466); SEQ ID No:1039 (nm_{—}006209); SEQ ID No:327 (nm_{—}173825); SEQ ID No:886 (nm_{—}000075); SEQ ID No:1032 (nm_{—}005688); SEQ ID No:264 (nm_{—}152862); SEQ ID No:1037 (nm_{—}023068); and SEQ ID No:1005 (nm_{—}014938), fragments, derivatives or complementary sequences thereof.

95. The method of claim 90, wherein said metagene adjusted value underEGFR is generated by comparing the expression level, in a biological sample from said female mammal and in a control, of the 24 nucleic acid sequences selected in the group consisting of: SEQ ID No:1071 (nm_{—}001033047); SEQ ID No:254 (nm_{—}005581); SEQ ID No:6 (nm_{—}003225); SEQ ID No:883 (nm_{—}000125); SEQ ID No:543 (nm_{—}005080); SEQ ID No:681 (nm_{—}020974); SEQ ID No:63 (nm_{—}001002295); SEQ ID No:212 (nm_{—}024852); SEQ ID No:635 (nm_{—}001002029); SEQ ID No:535 (nm_{—}003226); SEQ ID No:1125); SEQ ID No:1124; SEQ ID No:297 (nm_{—}016463); SEQ ID No:791 (nm_{—}016835); SEQ ID No:827 (nm_{—}152499); SEQ ID No:207 (nm_{—}003940); SEQ ID No:916 (nm_{—}001453) (or SEQ ID No:1116 (nm_{—}004040)); SEQ ID No:1052 (BX096026); SEQ ID No:159 (nm_{—}000224); SEQ ID No:25 (nm_{—}012391) (or SEQ ID No:1108 (NM_{—}053279)); SEQ ID No:845 (nm_{—}001089); and SEQ ID No:1085 (NM_{—}000720), fragments, derivatives or complementary sequences thereof.

96. The method of claim 90, wherein said metagene adjusted value underEGFR is generated by comparing the expression level, in a biological sample from said female mammal and in a control, of the 37 nucleic acid sequences selected in the group consisting of: SEQ ID No:1071 (nm_{—}001033047); SEQ ID No:254 (nm_{—}005581); SEQ ID No:6 (nm_{—}003225); SEQ ID No:883 (nm_{—}000125); SEQ ID No:543 (nm_{—}005080); SEQ ID No:681 (nm_{—}020974); SEQ ID No:63 (nm_{—}001002295); SEQ ID No:212 (nm_{—}024852); SEQ ID No:635 (nm_{—}001002029); SEQ ID No:535 (nm_{—}003226); SEQ ID No:1125; SEQ ID No:1124; SEQ ID No:297 (nm_{—}016463); SEQ ID No:791 (nm_{—}016835); SEQ ID No:827 (nm_{—}152499); SEQ ID No:207 (nm_{—}003940); SEQ ID No:916 (nm_{—}001453) (or SEQ ID No:1116 (nm_{—}004040)); SEQ ID No:1052 (BX096026); SEQ ID No:159 (nm_{—}000224); SEQ ID No:25 (nm_{—}012391) (or SEQ ID No:1108 (NM_{—}053279)); SEQ ID No:845 (nm_{—}001089); SEQ ID No:1085 (NM_{—}000720); SEQ ID No:109 (nm_{—}000662); SEQ ID No:342 (nm_{—}001846); SEQ ID No:927 (nm_{—}004703); SEQ ID No:280 (nm_{—}020764) (or SEQ ID No:1110 (NM_{—}024522)); SEQ ID No:210 (nm_{—}178840); SEQ ID No:181 (nm_{—}000848); SEQ ID No:116 (nm_{—}014034); SEQ ID No:250 (nm_{—}000930); SEQ ID No:177 (nm_{—}015996); SEQ ID No:825 (nm_{—}024704); SEQ ID No:145 (nm_{—}017786); and SEQ ID No:276 (nm_{—}012202), fragments, derivatives or complementary sequences thereof.

97. A method of assessing the clinical outcome of a female mammal suffering from breast cancer, comprising the steps of:
a) generating a metagene adjusted value underEGFR by comparing the expression level, in a biological sample from said female mammal and in a control, of at least one nucleic acid sequence selected in the group consisting of: SEQ ID No:1071 (NM_{—}001033047), SEQ ID No:254 (nm_{—}005581), SEQ ID No:6 (nm_{—}003225), SEQ ID No:883 (nm_{—}000125), SEQ ID No:543 (nm_{—}005080), SEQ ID No:681 (nm_{—}020974), SEQ ID No:63 (nm_{—}001002295), SEQ ID No:212 (nm_{—}024852), SEQ ID No:635 (nm_{—}001002029), SEQ ID No:535 (nm_{—}003226), SEQ ID No:1125, SEQ ID No:109 (nm_{—}000662), SEQ ID No:342 (nm_{—}001846), SEQ ID No:927 (nm_{—}004703), SEQ ID No:1124, SEQ ID No:124 (nm_{—}014899), SEQ ID No:280 (nm_{—}020764) (or SEQ ID No:1110 (NM_{—}024522)), SEQ ID No:297 (nm_{—}016463), SEQ ID No:791 (nm_{—}016835), SEQ ID No:210 (nm_{—}178840), SEQ ID No:827 (nm_{—}152499), SEQ ID No:1064 (NM_{—}000767), SEQ ID No:147 (nm_{—}014675), SEQ ID No:323 (nm_{—}001014443), SEQ ID No:106 (nm_{—}004619), SEQ ID No:181 (nm_{—}000848), SEQ ID No:376 (nm_{—}057158), SEQ ID No:116 (nm_{—}014034), SEQ ID No:252 (nm_{—}000758), SEQ ID No:797 (nm_{—}022131), SEQ ID No:911 (nm_{—}000168), SEQ ID No:720 (nm_{—}004726), SEQ ID No:889 (nm_{—}000561), SEQ ID No:250 (nm_{—}000930), SEQ ID No:179 (nm_{—}004747), SEQ ID No:786 (nm_{—}033388), SEQ ID No:177 (nm_{—}015996), SEQ ID No:1047 (BC012900), SEQ ID No:301 (nm_{—}004326), SEQ ID No:207 (nm_{—}003940), SEQ ID No:936 (nm_{—}003462), SEQ ID No:916 (nm_{—}001453) (or SEQ ID No:1116 (NM_{—}004040)), SEQ ID No:1052 (BX096026), SEQ ID No:159 (nm_{—}000224), SEQ ID No:1096 (AK127274), SEQ ID No:28 (nm_{—}021800), SEQ ID No:1054 (AK123264), SEQ ID No:25 (nm_{—}012391) (or SEQ ID No:1108 (NM_{—}053279)), SEQ ID No:825 (nm_{—}024704), SEQ ID No:145 (nm_{—}017786), SEQ ID No:491 (nm_{—}004374), SEQ ID No:485 (nm_{—}003834), SEQ ID No:1072 (AY007114), SEQ ID No:274 (nm_{—}032108), SEQ ID No:258 (nm_{—}080545), SEQ ID No:292 (nm_{—}014371), SEQ ID No:803 (nm_{—}183047), SEQ ID No:349 (nm_{—}031946), SEQ ID No:1123, SEQ ID No:763 (nm_{—}014585), SEQ ID No:438 (nm_{—}001759), SEQ ID No:94 (nm_{—}014315), SEQ ID No:845 (nm_{—}001089), SEQ ID No:1084 (BX648964), SEQ ID No:734 (nm_{—}025137), SEQ ID No:943 (nm_{—}002141), SEQ ID No:1085 (NM_{—}000720), and SEQ ID No:276 (nm_{—}012202), fragments, derivatives or complementary sequences thereof;
b) generating a metagene adjusted value overEGFR by comparing the expression level, in a biological sample from said female mammal and in a control, of at least one nucleic acid sequences selected in the group consisting of SEQ ID No:405 (nm_{—}000852), SEQ ID No:374 (nm_{—}000212), SEQ ID No:1122, SEQ ID No:598 (nm_{—}000636), SEQ ID No:262 (nm_{—}005194), SEQ ID No:1099 (BC066343), SEQ ID No:696 (nm_{—}001428), SEQ ID No:1059 (AK091113), SEQ ID No:751 (nm_{—}002423), SEQ ID No:1121, SEQ ID No:286 (nm_{—}002417), SEQ ID No:244 (nm_{—}199002), SEQ ID No:18 (nm_{—}001880), SEQ ID No:121 (nm_{—}014553), SEQ ID No:1107 (BC073775), SEQ ID No:103 (nm_{—}003619), SEQ ID No:1118, SEQ ID No:42 (nm_{—}000757), and SEQ ID No:1067 (AK123784), fragments, derivatives or complementary sequences thereof;
c) generating a score (S_{C}) from said metagene adjusted values using a mathematical method establishing a relation between the combined metagene values and the clinical outcome of said female mammal.

98. The method of claim 97, wherein said metagene adjusted value underEGFR is generated by comparing the expression level, in a biological sample from said female mammal and in a control, of the nucleic acid sequence consisting of: SEQ ID No:681 (nm_{—}020974).

99. The method of claim 97, wherein said metagene adjusted value underEGFR is generated by comparing the expression level, in a biological sample from said female mammal and in a control, of the 24 nucleic acid sequences selected in the group consisting of: SEQ ID No:1071 (nm_{—}001033047); SEQ ID No:254 (nm_{—}005581); SEQ ID No:6 (nm_{—}003225); SEQ ID No:883 (nm_{—}000125); SEQ ID No:543 (nm_{—}005080); SEQ ID No:681 (nm_{—}020974); SEQ ID No:63 (nm_{—}001002295); SEQ ID No:212 (nm_{—}024852); SEQ ID No:635 (nm_{—}001002029); SEQ ID No:535 (nm_{—}003226); SEQ ID No:1125); SEQ ID No:1124; SEQ ID No:297 (nm_{—}016463); SEQ ID No:791 (nm_{—}016835); SEQ ID No:827 (nm_{—}152499); SEQ ID No:207 (nm_{—}003940); SEQ ID No:916 (nm_{—}001453) (or SEQ ID No:1116 (nm_{—}004040)); SEQ ID No:1052 (BX096026); SEQ ID No:159 (nm_{—}000224); SEQ ID No:25 (nm_{—}012391) (or SEQ ID No:1108 (NM_{—}053279)); SEQ ID No:845 (nm_{—}001089); and SEQ ID No:1085 (NM_{—}000720), fragments, derivatives or complementary sequences thereof.

100. The method of claim 97, wherein said metagene adjusted value underEGFR is generated by comparing the expression level, in a biological sample from said female mammal and in a control, of the 37 nucleic acid sequences selected in the group consisting of: SEQ ID No:1071 (nm_{—}001033047); SEQ ID No:254 (nm_{—}005581); SEQ ID No:6 (nm_{—}003225); SEQ ID No:883 (nm_{—}000125); SEQ ID No:543 (nm_{—}005080); SEQ ID No:681 (nm_{—}020974); SEQ ID No:63 (nm_{—}001002295); SEQ ID No:212 (nm_{—}024852); SEQ ID No:635 (nm_{—}001002029); SEQ ID No:535 (nm_{—}003226); SEQ ID No:1125; SEQ ID No:1124; SEQ ID No:297 (nm_{—}016463); SEQ ID No:791 (nm_{—}016835); SEQ ID No:827 (nm_{—}152499); SEQ ID No:207 (nm_{—}003940); SEQ ID No:916 (nm_{—}001453) (or SEQ ID No:1116 (nm_{—}004040)); SEQ ID No:1052 (BX096026); SEQ ID No:159 (nm_{—}000224); SEQ ID No:25 (nm_{—}012391) (or SEQ ID No:1108 (NM_{—}053279)); SEQ ID No:845 (nm_{—}001089); SEQ ID No:1085 (NM_{—}000720); SEQ ID No:109 (nm_{—}000662); SEQ ID No:342 (nm_{—}001846); SEQ ID No:927 (nm_{—}004703); SEQ ID No:280 (nm_{—}020764) (or SEQ ID No:1110 (NM_{—}024522)); SEQ ID No:210 (nm_{—}178840); SEQ ID No:181 (nm_{—}000848); SEQ ID No:116 (nm_{—}014034); SEQ ID No:250 (nm_{—}000930); SEQ ID No:177 (nm_{—}015996); SEQ ID No:825 (nm_{—}024704); SEQ ID No:145 (nm_{—}017786); and SEQ ID No:276 (nm_{—}012202), fragments, derivatives or complementary sequences thereof.

101. The method of claim 97, wherein the step b) of generating a metagene adjusted value overEGFR is obtained by comparing the expression level, in a biological sample from said female mammal and in a control, of at least 5 nucleic acid sequences selected in said group.

102. The method of claim 97, wherein said metagene adjusted value overEGFR is generated by comparing the expression level, in a biological sample from said female mammal and in a control, of the nucleic acid sequence consisting of: SEQ ID No: 1107 (BC073775) or SEQ ID No: 1099 (BC066343), fragments, derivatives or complementary sequences thereof.

103. The method of claim 97, wherein said metagene adjusted value overEGFR is generated by comparing the expression level, in a biological sample from said female mammal and in a control, of the 5 nucleic acid sequences selected in the group consisting of: SEQ ID No:1122; SEQ ID No:598 (nm_{—}000636); SEQ ID No:696 (nm_{—}001428); SEQ ID No:1059 (AK091113); and SEQ ID No:121 (nm_{—}014553), fragments, derivatives or complementary sequences thereof.

104. The method of claim 97, wherein said metagene adjusted value overEGFR is generated by comparing the expression level, in a biological sample from said female mammal and in a control, of the 12 nucleic acid sequences selected in the group consisting of: SEQ ID No:1122; SEQ ID No:598 (nm_{—}000636); SEQ ID No:696 (nm_{—}001428); SEQ ID No:1059 (AK091113); SEQ ID No:121 (nm_{—}014553); SEQ ID No:262 (nm_{—}005194); SEQ ID No:1099 (BC066343); SEQ ID No:751 (nm_{—}002423); SEQ ID No:1121; SEQ ID No:286 (nm_{—}002417); SEQ ID No:103 (nm_{—}003619); and SEQ ID No:1118, fragments, derivatives or complementary sequences thereof.

105. A method of assessing the clinical outcome of a female mammal suffering from breast cancer, comprising the steps of:
a) generating a metagene adjusted value underER by comparing the expression level, in a biological sample from said female mammal and in a control, of at least two genes, e.g. by using nucleic acid sequences selected in the group of Affymetrix® Probe Sets, of table IX or XII, preferably table XII,
b) generating said metagene adjusted value underPR by comparing the expression level, in a biological sample from said female mammal and in a control, of at least two genes, e.g. by using nucleic acid sequences selected in the group of Affymetrix® Probe Sets, of table X or XIII, preferably table XIII,
c) generating said metagene adjusted value underEGFR by comparing the expression level, in a biological sample from said female mammal and in a control, of at least two genes, e.g. by using nucleic acid sequences selected in the group of Affymetrix® Probe Sets, of table XI or XIV preferably table XIV,
d) generating a score (S_{C}) from said metagene adjusted values using a mathematical method establishing a relation between the combined metagene values and the clinical outcome of said female mammal.

106. The method of claim 90, 97 or 105, wherein the mathematical method used in step d) comprises a Cox regression or CART analysis.

107. The method of claim 90, 97 or 105, wherein the mathematical method used in step d) is a Cox regression and the score (S_{C}) is generated according to the following formula: S_{C}=a×underER+b×underPR+c×under EGFR, wherein “a” is comprised in the interval [−6.26; +0.49] “b” is comprised in the interval [−2.65; +0.29] and “c” is comprised in the interval [−6.69; +1.65].

108. The method of claim 90. 97 or 105, further comprising the step e) of comparing said score (S_{C}) from the biological sample with a baseline or a score (S_{C}) from a control sample.

109. The method of claim 90, 97 or 105, further comprising the step of administrating a pharmaceutical treatment to a female mammal, for optimizing the clinical outcome of said female mammal in response to said treatment.

110. The method of claim 90, 97 or 105, further comprising the step of generating a printed report.

111. A Computer program comprising instructions for performing the method according to claim 90, 97 or 105.

112. A recording medium for recording the computer program according to claim 110.

The application's sequence listing, which the Patent Office published only in electronic form, follows.

SEQUENCE LISTING (1129 sequences)

SEQ ID NO: 1 - DNA, 391 bp, Homo sapiens
ttattttattaataatttattgtcagtaagaaagactggctaatggtagttttcattaaaaacctttacaagaccattgcatcacaaatatacagacactataaaaactgtgtcatggtggttttggttctaaacaggtatgcagaaggtccccgttacactttccaataatgaaaaatgtttataattctaaatacagcaacccatgtaagacatgttcatgtatctgatctctccttcatcctatgtacagctagaaatgaatgactacactgaaatgtactaacaaaatgtcacacttcagtggaaaaagacagaatgaaaccctggttatagtaaaaaaaaaaaaaaatcagggtgctagataatggcactgacaccaccaaaattc

SEQ ID NO: 2 - DNA, 14752 bp, Homo sapiens
ctgggcggccgggcgcggggagagggcgcgggagcggctcgtgcggcaggtaccatgcggacgcgcgagcccggcgagggccccggcaggcccggtccctgctcgggggcgcgctgagacggcgggtgagctccacgagagcgccgtcgccacttcgggccaactttgcgattcccgacagttaagcaatggggagacatttggctttgctcctgcttctgctccttctcttccaacattttggagacagtgatggcagccaacgacttgaacagactcctctgcagtttacacacctcgagtacaacgtcaccgtgcaggagaactctgcagctaagacttatgtggggcatcctgtcaagatgggtgtttacattacacatccagcgtgggaagtaaggtacaaaattgtttccggagacagtgaaaacctgttcaaagctgaagagtacattctcggagacttttgctttctaagaataaggaccaaaggaggaaatacagctattcttaatagagaagtgaaggatcactacacattgatagtgaaagcacttgaaaaaaatactaatgtggaggcgcgaacaaaggtcagggtgcaggtgctggatacaaatgacttgagaccgttattctcacccacctcatacagcgtttctttacctgaaaacacagctataaggaccagtatcgcaagagtcagcgccacggatgcagacataggaaccaacggggaattttactacagttttaaagatcgaacagatatgtttgctattcacccaaccagtggtgtgatagtgttaactggtagacttgattacctagagaccaagctctatgagatggaaatcctcgctgcggaccgtggcatgaagttgtatgggagcagtggcatcagcagcatggccaagctaacggtgcacatcgaacaggccaatgaatgtgctccggtgataacagcagtgacattgtcaccatcagaactggacagggacccagcatatgcaattgtgacagtggatgactgcgatcagggtgccaatggtgacatagcatctttaagcatcgtggcaggtgaccttctccagcagtttagaacagtgaggtcctttccagggagtaaggagtataaagtcaaagccatcggtggcattgattgggacagtcatcctttcggctacaatctcacactacaggctaaagataaaggaactccgccccagttctcttctgttaaagtcattcacgtgacttctccacagttcaaagccgggccagtcaagtttgaaaaggatgtttacagagcagaaataagtgaatttgctcctcccaacacacctgtggtcatggtaaaggccattcctgcttattcccatttgaggtatgtttttaaaagtacacctggaaaagctaaattcagtttaaattacaacactggtctcatttctattttagaaccagttaaaagacagcaggcagcccattttgaacttgaagtaacaacaagtgacagaaaagcgtccaccaaggtcttggtgaaagtcttaggtgcaaatagcaatccccctgaatttacccagacagcgtacaaagctgcttttgatgagaacgtgcccattggtactactgtcatgagcctgagtgccgtagaccctgatgagggtgagaacgggtacgtgacatacagtatcgcaaatttaaatcatgtgccgtttgcgattgaccatttcactggtgccgtgagtacgtcagaaaacctggactacgaactgatgcctcgggtttatactctgaggattcgtgcatcagactggggcttgccgtaccgccgggaagtcgaagtccttgctacaattactctcaataacttgaatgacaacacacctttgtttgagaaaataaattgtgaagggacaattcccagagatctaggcgtgggagagcaaataaccactgtttctgctattgatgcagatgaacttcagttggtacagtatcagattgaagctggaaatgaactggatttctttagtttaaaccccaactcgggggtattgtcattaaagcgatcgctaatggatggcttaggtgcaaaggtgtctttccacagtctgagaatcacagctacagatggagaaaattttgccacaccattatatatcaacataacagtggctgccagtcacaagctggtaaacttgcagtgtgaagagactggtgttgccaaaatgctggcagagaagctcctgcaggcaaataaattacacaaccagggagaggtggaggatattttcttcgattctcactctgtcaatgctcacataccgcagtttagaagcactcttccgactggtattcaggtaaaggaaaaccagcctgtgggttccagtgtaattttcatgaactccactgaccttgacactggcttcaatggaaaactggtctatgctgtttctggaggaaatgaggatagttgcttcatgattgatatggaaacaggaatgctgaaaattttatctcctcttgaccgtgaaacaacagacaaatacaccctgaatattaccgtctatgaccttgggataccccagaaggctgcgtggcgtcttctacatgtcgtggttgtcgatgccaatgataatccacccgagtttttacaggagagctattttgtggaagtgagtgaagacaaggaggtacatagtgaaatcatccaggttgaagccacagataaagacctggggcccaacggacacgtgacgtactcaattgttacagacacagacacattttcaattgacagcgtgacgggtgttgttaacatcgcacgccctctggatcgagagctgcagcatgagcactccttaaagattgaggccagggaccaagccagagaagagcctcagctgttctccactgtcgttgtgaaagtatcactagaagatgttaatgacaacccacctacatttattccacctaattatcgtgtgaaagtccgagaggatcttccagaaggaaccgtcatcatgtggttagaagcccacgatcctgatttaggtcagtctggtcaggtgagatacagccttctggaccacggagaaggaaacttcgatgtggataaactcagtggagcagttaggatcgtccagcagttggactttgagaagaagcaagtgtataatctcactgtgagggccaaagacaagggaaagccagtttctctgtcttctacttgctatgttgaagttgaggtggttgatgtgaatgagaacctgcacccacccgtgttttccagctttgtggaaaaggggacagtgaaagaagatgcacctgttggttcattggtaatgacggtgtcggctcatgatgaggacgccagaagagatggggagatccgatactccattagagatggctctggcgttggtgttttcaaaataggtgaagagacaggtgtcatagagacgtcagatcgactggaccgtgaatcgacctcccattattggctaacagtctttgcaaccgatcagggtgtcgtgcctctttcatcgttcatagagatctacatagaggttgaggatgtcaatgacaatgcaccacagacatcagagcctgtttattacccagaaatcatggaaaattctcctaaagatgtatctgtggtccagatcgaggcatttgatccagattcgagctctaatgacaagctcatgtacaaaattacaagtggaaatccacaaggattcttttcaatacatcctaaaacaggtctcatcacaactacgtcaaggaagctagaccgagaacagcaagatgaacacatattagaggttactgtgacagacaatggtagtccccccaaatcaaccattgcaagagtcattgtgaaaatccttgatgaaaatgacaacaaacctcagtttctgcaaaagttctacaaaatcagactccctgagcgggaaaagccagaccgagaaagaaatgccagacgggagccgctctatcacgtcatagccaccgacaaggatgagggccccaatgcagaaatctcctacagcatcgaagacgggaatgagcatggcaaatttttcatcgaaccgaaaactggagtggtttcgtccaagaggttttcagcagctggagaatatgatattctttcaattaaggcagttgacaatggtcgccctcaaaagtcatcaaccaccagactccatattgaatggatctccaagcccaaaccgtccctggagcccatttcatttgaagaatcattttttacctttactgtgatggaaagtgaccccgttgctcacatgattggagtaatatctgtggagcctcctggcatacccctttggtttgacatcactggtggcaactacgacagtcacttcgatgtggacaagggaactggaaccatcattgttgccaaacctcttgatgcagaacagaagtcaaactacaacctcacagtcgaggctacagatggaaccaccactatcctcactcaggtattcatcaaagtaatagacacaaatgaccatcgtcctcagttttctacatcaaagtatgaagttgttattcctgaagatacagcgccagaaacagaaattttgcaaatcagtgctgtggatcaggatgagaaaaacaaactaatctacactctgcagagcagtagagatccactgagtctcaagaaatttcgtcttgatcctgcaaccggctctctctatacttctgagaaactggatcatgaagctgttcaccagcacaccctcacggtcatggtacgagatcaagatgtgcctgtaaaacgcaactttgcaaggattgtggtcaatgtcagcgacacgaatgaccacgccccgtggttcaccgcttcctcctacaaagggcgggtttatgaatcggcagccgttggctcagttgtgttgcaggtgacggctctggacaaggacaaagggaaaaatgctgaagtgctgtactcgatcgagtcaggaaatattggaaattcttttatgattgatcctgtcttgggctctattaaaactgccaaagaattagatcgaagtaaccaagcggagtatgatttaatggtaaaagctacagataagggcagtccaccaatgagtgaaataacttctgtgcgtatctttgtcacaattgctgacaacgcctctccgaagtttacatcaaaagaatattctgttgaacttagtgaaactgtcagcattgggagtttcgttgggatggttacagcccatagtcaatcatcagtggtgtatgaaataaaagatggaaatacaggtgatgcttttgatattaatccacattctggaactatcatcactcagaaagccctggactttgaaactttgcccatttacacattgataatacaaggaactaacatggctggtttgtccactaatacaacggttctagttcacttgcaggatgagaatgacaacgcgccagtttttatgcaggcagaatatacaggactcattagtgaatcagcctcaattaacagcgtggtcctaacagacaggaatgtcccactggtgattcgagcagctgatgctgataaagactcaaatgctttgcttgtatatcacattgttgaaccatctgtacacacatattttgctattgattctagcactggtgctattcatacagtactaagtctggactatgaagaaacaagtatttttcactttaccgtccaagtgcatgacatgggaaccccacgtttatttgctgagtatgcagcgaatgtaacagtacatgtaattgacattaatgactgcccccctgtgtttgccaagccattatatgaagcatctcttttgttaccaacatacaaaggagtaaaagtcatcacagtaaatgctacagatgctgattcaagtgcattctcacagttgatttactccatcaccgaaggcaacatcggggagaagttttctatggactacaagactggtgctctcactgtccaaaacacaactcagttaagaagccgctacgagctaaccgttagagcttccgatggcagatttgccggccttacctctgtcaaaattaatgtgaaagaaagcaaagaaagtcacctaaagtttacccaggatgtctactctgcggtagtgaaagagaattccaccgaggccgaaacattagctgtcattactgctattgggaatccaatcaatgagcctttgttttatcacatcctcaacccagatcgcagatttaaaataagccgcacttcaggagttctgtcaaccactggcacgcccttcgatcgtgagcagcaggaggcgtttgatgtggttgtagaagtgacagaggaacataagccttctgcagtggcccacgttgtcgtgaaggtcattgtagaagaccaaaatgataatgcgccggtgtttgtcaaccttccctactacgccgttgttaaagtggacactgaggtgggccatgtcattcgctatgtcactgctgtagacagagacagtggcagaaacggggaagtgcattactacctcaaggaacatcatgaacactttcaaattggacccttgggtgaaatttcactgaaaaagcaatttgagcttgacaccttaaataaagaatatcttgttacagtggttgcaaaagatggagggaacccggccttttcagcggaagttatcgttccgatcactgtcatgaataaagccatgcctgtgtttgaaaaacctttctacagtgcagagattgcagagagcatccaggtgcacagccctgtggtccacgtgcaggctaacagcccggaaggcctgaaagtgttctacagcatcacagacggagaccctttcagccagttcactattaacttcaatactggagttatcaatgtcatagctcctctggactttgaggcccacccggcatataagctgagcatacgcgcaactgactccttgacgggcgctcatgctgaagtatttgtggacatcatagtagacgacatcaatgataaccctcctgtgtttgctcagcagtcttatgcggtgaccctgtctgaggcatctgtaattggaacgtctgttgttcaagttagagccaccgattctgattcagaaccaaatagaggaatctcataccagatgtttgggaatcacagcaagagtcatgatcattttcatgtagacagcagcactggcctcatctcactactcagaaccctggattacgagcagtcccggcagcacacgatttttgtgagggcagttgatggtggtatgcccacgctgagcagtgatgtgattgtcacggtggacgttaccgacctcaatgataatccaccactctttgaacaacagatttatgaagccagaattagcgagcacgcccctcatgggcatttcgtgacctgtgtaaaagcctatgatgcagacagttcagacatagacaagttgcagtattccattctgtctggcaatgatcataaacattttgtcattgacagtgcaacagggattatcaccctctcaaacctgcaccggcacgccctgaagccattttacagtcttaacctgtcagtgtctgatggagtttttagaagttccacccaggttcatgtaactgtaattggaggcaatttgcacagtcctgctttccttcagaacgaatatgaagtggaactagctgaaaacgctcccctacataccctggtgatggaggtgaaaactacggatggggattctggtatttatggtcacgttacttaccatattgtaaatgactttgccaaagacagattttacataaatgagagaggacagatatttactttggaaaaacttgatcgagaaaccccggcggagaaagtgatctcagtccgtttaatggctaaggatgctggaggaaaagttgctttctgcaccgtgaatgtcatccttacagatgacaatgacaatgcaccacaatttcgagcaaccaaatacgaagtgaatatcgggtccagtgctgctaaagggacttcagtcgttaaagttcttgcaagtgatgccgatgagggctccaatgccgacatcacctatgccattgaagcagactctgaaagtgtaaaagagaatttggaaattaacaaactgtccggcgtaatcactacaaaggagagcctcattggcttggaaaatgaattcttcactttctttgttagagctgtggataatgggtctccatcaaaagaatctgttgttcttgtctatgttaaaatccttccaccggaaatgcagcttccaaaattttcagaacctttctatacctttacagtgtcagaggacgtgcctattggaacagagatagatctcatccgagcagaacatagtgggactgttctttacagcctggtcaaagggaatactccagaaagcaatagggatgagtcctttgtgattgacagacagagcgggagactgaagttggagaagagtcttgatcatgagacaactaagtggtatcagttttccatactggccaggtgcactcaagatgaccatgagatggtggcttctgtagatgttagtatccaagtgaaagatgcaaatgacaacagcccggtctttgaatctagtccatatgaggcattcattgttgaaaacctgccagggggaagtagagtaattcagatcagggcatctgatgctgactcaggaaccaacggccaagttatgtatagcctggatcagtcacaaagtgtggaagtcattgaatcctttgccattaacatggaaacaggctggattacaactttaaaggaacttgaccatgaaaagagagacaattaccagattaaagtggttgcatcagatcatggtgaaaagatccagctatcctccacagccattgtggatgttaccgtcaccgatgtcaacgatagtccaccacgattcacggccgagatctataaagggactgtgagtgaggatgacccccaaggtggggtgattgccatcttaagtaccacggatgctgattctgaagagatcaacagacaagttacatatttcataacaggaggggatcctttaggacagtttgccgttgaaactatacagaatgaatggaaggtatatgtgaagaaacctctagacagggaaaaaagggacaattaccttcttactatcacggcaactgatggcaccttctcatcaaaagcgatagttgaagtgaaagttctggatgcaaatgacaacagtccagtttgtgaaaagactttatattcagacactattcctgaagacgtccttcctggaaaattgatcatgcagatctctgctacagacgcagacatccgctctaacgctgaaattacttacacgttattgggttcaggtgcagaaaaattcaaactaaatccagacacaggtgaactgaaaacgtcaaccccccttgatcgtgaggagcaagctgtttatcatcttctcgtcagggccacagatggaggaggaagattctgccaagccagtattgtgctcacgctagaagatgtgaacgataacgcccccgaattctctgccgatccttatgccatcaccgtgtttgaaaacacagagccgggaacgctgctgacaagagtgcaggccacagatgccgacgcaggattaaatcggaagattttatactcactgattgactctgctgatgggcagttctccattaacgaattatctggaattattcagttagaaaaacctttggacagagaactccaggcagtatacaccctctctttgaaagctgtggatcaaggcttgccaaggaggctgactgccactggcactgtgattgtatcagttcttgacataaatgacaacccccctgtgtttgagtaccgtgaatatggtgccaccgtgtctgaggacattcttgttggaactgaagttcttcaagtgtatgcagcaagtcgggatattgaagcaaatgcagaaatcacctactcaataataagtggaaatgaacatgggaaattcagcatagattctaaaacaggggccgtatttatcattgagaatctggattatgagagctctcatgagtattacctaacagtagaggccactgatggaggcacgccttcactgagcgacgttgccactgtgaacgttaatgtaacagatatcaacgataatacccctgtgttcagccaagacacctacacgacagtcatcagtgaagatgccgttcttgagcagtctgtcatcacggttatggccgatgatgccgatggaccttccaacagccacatccactactcaattatagatggcaaccaaggaagctcgttcacaattgaccccgtcaggggagaagtcaaagtgaccaaacttctcgaccgagaaacgatttcaggttacacgctcacggttcaagcttctgataatggcagtccacccagagtcaacacgacgaccgtgaacatcgatgtgtccgatgtcaatgacaacgcgcccgtcttctccaggggaaactacagtgtcattatccaggaaaataagccagtgggcttcagcgtgctgcagctggtagtaacagatgaggattcttcccataacggtccacccttcttctttactattgtaactggaaatgatgagaaggcttttgaagttaacccgcaaggagtcctcctgacatcatctgccatcaagaggaaggagaaagatcattacttactgcaggtgaaggtggcagataatggaaagcctcagttgtcatctttgacatacattgacattagggtaattgaggagagcatctatccgcctgcgattttgcccctggagattttcatcacctcttctggagaagaatactcaggtggcgtcattgggaagatccatgccacagaccaggacgtgtatgatactctaacctacagtctcgaccctcagatggacaacctgttctctgtttccagcacagggggcaagctgatagcacacaaaaagctagacatagggcaataccttctcaatgtcagcgtaacagatgggaagttcacgacggtggccgacatcacagtgcatatcagacaagtcacacaggagatgttgaaccacaccatcgcgatccgctttgccaacctcactccggaagaattcgttggtgactactggcgcaacttccagcgagctttacggaacatcctgggtgtgaggaggaacgacatacagattgttagtttgcagtcctctgaacctcacccacatctggacgtcttactttttgtagagaaaccaggtagtgctcagatctcaacaaaacaacttctgcacaagattaactcttccgtgactgacattgaggaaatcattggagttaggatactgaatgtattccagaaactctgcgcgggactggactgcccctggaagttctgcgatgaaaaggtgtctgtggatgaaagtgtgatgtcaacacacagcacagccagactgagttttgtgactccccgccaccacagggcagcggtgtgtctctgcaaagagggaaggtgcccacctgtccaccatggctgtgaagatgatccgtgccctgagggatccgaatgtgtgtctgatccctgggaggagaaacacacctgtgtctgtcccagcggcaggtttggtcagtgcccagggagttcatctatgacactgactggaaacagctacgtgaaataccgtctgacggaaaatgaaaacaaattagagatgaaactgaccatgaggctcagaacatattccacgcatgcggttgtcatgtatgctcgaggaactgactatagcatcttggagattcatcatggaaggctgcagtacaagtttgactgtggaagtggccctggaattgtctctgttcagagcattcaggtcaatgatgggcagtggcacgcagtggccctggaagtgaatggaaactatgctcgcttggttctagaccaagttcatactgcatcgggcacagccccagggactctgaaaaccctgaacctggataactatgtgttttttggtggccacatccgtcagcagggaacaaggcatggaagaagtcctcaagttggtaatggtttcaggggttgtatggactccatttatttgaatgggcaggagctccctttaaacagcaaacccagaagctatgcacacatcgaagagtcggtggatgtatctccaggctgcttcctgacggccacggaagactgcgccagcaacccttgccagaatggaggcgtttgcaatccgtcacctgctggaggttattactgcaaatgcagtgccttgtacatagggacccactgtgagataagcgtcaatccgtgttcctccaagccatgcctctatgggggcacgtgtgttgtcgacaacggaggctttgtttgccagtgtagaggattatatactggtcagaggtgtcagcttagtccatactgcaaagatgaaccctgtaagaatggcggaacatgctttgacagtttggatggcgccgtttgtcagtgtgattcgggttttaggggagaaaggtgtcagagtgatatcgacgagtgctctggaaacccttgcctgcacggggccctctgtgagaacacgcacggctcctatcactgcaactgcagccacgagtacaggggacgtcactgcgaggatgctgcgcccaaccagtatgtgtccacgccgtggaacattgggttggcggaaggaattggaatcgttgtgtttgttgcagggatatttttactggtggtggtgtttgttctctgccgtaagatgattagtcggaaaaagaagcatcaggctgaacctaaagacaagcacctgggacccgctacggctttcttgcaaagaccgtattttgattccaagctaaataagaacatttactcagacataccaccccaggtgcctgtccggcctatttcctacaccccgagtattccaagtgactcaagaaacaatctggaccgaaattccttcgaaggatctgctatcccagagcatcccgaattcagcacttttaaccccgagtctgtgcacgggcaccgaaaagcagtggcggtctgcagcgtggcgccaaacctgcctcccccacccccttcaaactccccttctgacagcgactccatccagaagcctagctgggactttgactatgacacaaaagtggtggatcttgatccctgtctttccaagaagcctctagaggaaaagccttcccagccatacagtgcccgggaaagcctgtctgaagtgcagtctctgagctccttccagtccgaatcgtgcgatgacaatgggtatcactgggatacatcagattggatgccaagcgttcctctgccggacatacaagagttccccaactatgaggtgattgatgagcagacacccctgtactcagcagatccaaacgccatcgatacggactattaccctggaggctacgacatcgaaagtgattttcctccacccccagaagacttccccgcagctgatgagctaccaccgttaccgcccgaattcagcaatcagtttgaatccatccaccctcctagagacatgcctgccgcgggtagcttgggttcttcatcaagaaaccggcagaggttcaacttgaatcagtatttgcccaatttttatcccctcgatatgtctgaacctcaaacaaaaggcactggtgagaatagtacttgtagagaaccccatgccccttacccgccagggtatcaaagacacttcgaggcgcccgctgtcgagagcatgcccatgtctgtgtacgcctccaccgcctcctgctctgacgtgtcagcctgctgcgaagtggagtccgaggtcatgatgagtgactatgagagcggggacgacggccacttcgaagaggtgacgatcccgcccctggattcccagcagcacacggaagtctgactctcaactccccccaaagtgcctgactttagtgaacctagaggtgatgtgagtaatccgcgctgttctttgcagcagtgcttccaagctttttttggtgagccgaatgggcatggctgcgctggatcctgcgcctctggacgtgctagccatttccagtgtcccaactactgtcatcgtgaggttttcatcggctgtgccatttcccaacgtcttttgggatttacatctgtctgtgttaaaataatcaaacgaaaaatcagtcctgtgttgtcagcatgattcatgtatttatatagatttgattattttaattttcctgtctcttttttttgtaaattttatgtacagatttgatttttcatagttttaactagatttccaagatattttgtgcatttgtttcaactgaattttggtggtgtcagtgccattatctagcaccctgatttttttttttttactataaccagggtttcattctgtctttttccactgaagtgtgacattttgttagtacatttcagtgtagtcattcatttctagctgtacataggatgaaggagagatcagatacatgaacatgtcttacatgggttgctgtatttagaattataaacatttttcattattggaaagtgtaacggggaccttctgcatacctgtttagaaccaaaaccaccatgacacagtttttatagtgtctgtatatttgtgatgcaatggtcttgtaaaggtttttaatgaaaactaccattagccagtctttcttactgacaataaattattaataaaat

SEQ ID NO: 3 - DNA, 558 bp, Homo sapiens
tttttcctgcttgagagttttactgacagaaaaaaagaatctgtgcatacccattccctttgctacatagctgaggcattttattttaccattaatttagaagtgagagaagggtcaggtctctccagctttagttctcttggaaacataagattgtccagtagacagcttgttaaacccaagtcattcctaaggcaccatgtcaaagatacttcatacccctcctccaaaaccaaagaaaacacacagagattaatacactacagaaggaataaacattttagatcagtttgtgactactgacctgtctcctgtttataccatcagaaaagctgatataatagctgttttcccggaagctttatcctggcagtcacaacaggaagaggcctgtagagaaccccagggagcagtgcactctcattaggctgcagcacttaaggtttttaacagaggaaaaacccaatgattcagtctttggcatctccactccatctgcattaatggcggacatagctttcgcttcagggagacagggaaagtcgtagatttgcagat

SEQ ID NO: 4 - DNA, 2254 bp, Homo sapiens
gggaattctgaaagccgctggcggaccgcgcgcagcggccagagaccgagccctaaggagagtgcggcgcttcccgaggcgtgcagctgggaactgcaactcatctgggttgtgcgcagaaggctggggcaagcgagtagagaagtggagcgtaagccaggggcgttgggggccgtgcgggtcgggcgcgtgccacgcccgcggggtgaagtcggagcgcggggcctgctggagagaggagcgctgcggaccgagtaatggcaatgcagatgcagcttgaagcaaatgcagatacttcagtggaagaagaaagctttggcccacaacccatttcacggttagagcagtgtggcataaatgccaacgatgtgaagaaattggaagaagctggattccatactgtggaggctgttgcctatgcgccaaagaaggagctaataaatattaagggaattagtgaagccaaagctgataaaattctggctgaggcagctaaattagttccaatgggtttcaccactgcaactgaattccaccaaaggcggtcagagatcatacagattactactggctccaaagagcttgacaaactacttcaaggtggaattgagactggatctatcacagaaatgtttggagaattccgaactgggaagacccagatctgtcatacgctagctgtcacctgccagcttcccattgaccggggtggaggtgaaggaaaggccatgtacattgacactgagggtacctttaggccagaacggctgctggcagtggctgagaggtatggtctctctggcagtgatgtcctggataatgtagcatatgctcgagcgttcaacacagaccaccagacccagctcctttatcaagcatcagccatgatggtagaatctaggtatgcactgcttattgtagacagtgccaccgccctttacagaacagactactcgggtcgaggtgagctttcagccaggcagatgcacttggccaggtttctgcggatgcttctgcgactcgctgatgagtttggtgtagcagtggtaatcactaatcaggtggtagctcaagtggatggagcagcgatgtttgctgctgatcccaaaaaacctattggaggaaatatcatcgcccatgcatcaacaaccagattgtatctgaggaaaggaagaggggaaaccagaatctgcaaaatctacgactctccctgtcttcctgaagctgaagctatgttcgccattaatgcagatggagtgggagatgccaaagactgaatcattgggtttttcctctgttaaaaaccttaagtgctgcagcctaatgagagtgcactgctccctggggttctctacaggcctcttcctgttgtgactgccaggataaagcttccgggaaaacagctattatatcagcttttctgatggtataaacaggagacaggtcagtagtcacaaactgatctaaaatgtttattccttctgtagtgtattaatctctgtgtgttttctttggttttggaggaggggtatgaagtatctttgacatggtgccttaggaatgacttgggtttaacaagctgtctactggacaatcttatgtttccaagagaactaaagctggagagacctgacccttctctcacttctaaattaatggtaaaataaaatgcctcagctatgtagcaaagggaatgggtctgcacagattctttttttctgtcagtaaaactctcaagcaggtttttaagttgtctgtctgaatgatcttgtgtaagggtttggttatggagtcttgtgccaaacctactaggccattagcccttcaccatctacctgcttggtctttcattgctaagactaactcaagataatcctagagtcttaaagcatttcaggccagtgtggtgtcttgcgcctgtactcccagcactttgggaggccgaggcaggtggatcgcttgagccaggagttttaagtccagcttggccaagatggtgaaatcccatctctacaaaaaatgcagaacttaatctggacacactgttacacgtgcctgtagtcccagctactctatagcctgaggtgggagaatcacttaagcctggaaggtggaagttgcagtgagtcgagattgcactgctgcattccagccagggtgacagagtgagaccatgtttcaaacaagaaacatttcagagggcaagtaaacagatttgattgtgaggcttctaataaagtagttattagtagtg

SEQ ID NO: 5 - DNA, 475 bp, Homo sapiens
ttttttaatatcgatctcttttaatttttaggccaattttgagtagtcaaagtcagagcagtcaatctgtgttgtgagccgaggcacagctgcagaagcgtgtctgaggtgtccggtggaggtggcagccgagctctgggactaatcaccgtgctggggatggcaccgcgtcaggatgcaggcagatccctgcagaagtgtctaaaattcacactccttctggagggacgtcgatggtattaggatagaagcaccaggggaccccacgaacggtgtcgtcgaaacagcaagccttatttgcacactgggagggcgtgacacccaggaaaaccacaatctgtctttcacgggggggcactgtacaagtctctgtctggggctccgcaaaggttgccaggggccgcattggaaaccagggaccaaggcgcagatcaaccttgttctcccaaggggggcaatttgctcccctctcctc

SEQ ID NO: 6 - DNA, 508 bp, Homo sapiens
atccctgactcggggtcgcctttggagcagagaggaggcaatggccaccatggagaacaaggtgatctgcgccctggtcctggtgtccatgctggccctcggcaccctggccgaggcccagacagagacgtgtacagtggccccccgtgaaagacagaattgtggttttcctggtgtcacgccctcccagtgtgcaaataagggctgctgtttcgacgacaccgttcgtggggtcccctggtgcttctatcctaataccatcgacgtccctccagaagaggagtgtgaattttagacacttctgcagggatctgcctgcatcctgacgcggtgccgtccccagcacggtgattagtcccagagctcggctgccacctccaccggacacctcagacacgcttctgcagctgtgcctcggctcacaacacagattgactgctctgactttgactactcaaaattggcctaaaaattaaaagagatcgatattaaaaaaaaaaaaaaaaaa

SEQ ID NO: 7 - DNA, 485 bp, Homo sapiens
  modified_base (198)..(198): a, c, t or g
ttttttttttttttttttttttttttttttgacttggaggaagagactttatttggccccagccactagccccacagccaagacagtttgacataacaggccccgggcactggtttgggtagaggcagggtggcctggcctccgtgattagtggctgtggcgtgcgcacaatggactgtggccgtggcgtggccatgntgatcttggccactgtggtcttagggggtgcctccccgaggcctggcttatggtggtggccagggcctcgtcaccctcgtgcatcttctcgtgggaggcccaggttagcctcgccatcagcatgatgaactcctcgaagctcagctgcttgtctgcatttgtgtccaggtcctccatgatgtgttctatgaccttttcattcttattctccttcttgagaaaattttgcagatcttttcgcaccagctctttgaattccccctggttcagggtgtctgggtgcacag

SEQ ID NO: 8 - DNA, 576 bp, Homo sapiens
aaacactctgtgtggctcctcggctttgggacagagtgcaagacgatgacttgcaaaatgtcgcagctggaacgcaacatagagaccatcatcaacaccttccaccaatactctgtgaagctggggcacccagacaccctgaaccagggggaattcaaagagctggtgcgaaaagatctgcaaaattttctcaagaaggagaataagaatgaaaaggtcatagaacacatcatggaggacctggacacaaatgcagacaagcagctgagcttcgaggagttcatcatgctgatggcgaggctaacctgggcctcccacgagaagatgcacgagggtgacgagggccctggccaccaccataagccaggcctcggggagggcaccccctaagaccacagtggccaagatcacagtggccacggccatggccacagtcatggtggccacggccacaggccactaatcaggaggccaggccaccctgcctctacccaaccagggccccggggcctgttatgtcaaactgtcttggctgtggggctaggggctggggccaaataaagtctcttcctccaa

SEQ ID NO: 9 - DNA, 361 bp, Homo sapiens
ttagcacaaacacatttatttattaaccaaagggatgatcctaattaatccaacacactttgaaatagctgcatgtaaaatgtttatgataaagataattgaacacagtagtgccgaaacagcagaaagagacagtatggagaattgctcattggactgagcttggtcattctcttaattaactcctgtccaaagtgatgatggaatttttattctactttttcatagatccgagtacaggtgacattgttcatgacacactccaccactaatttcccatctttcaattttcttgttattgtgctttccttcccatcccactcctgatgctgaaccaatgcaccatctgtaaagttgcaga

SEQ ID NO: 10 - DNA, 662 bp, Homo sapiens
accgccgacgcagacccctctctgcacgccagcccgcccgcacccaccatggccacagttcagcagctggaaggaagatggcgcctggtggacagcaaaggctttgatgaatacatgaaggagctaggagtgggaatagctttgcgaaaaatgggcgcaatggccaagccagattgtatcatcacttgtgatggtaaaaacctcaccataaaaactgagagcactttgaaaacaacacagttttcttgtaccctgggagagaagtttgaagaaaccacagctgatggcagaaaaactcagactgtctgcaactttacagatggtgcattggttcagcatcaggagtgggatgggaaggaaagcacaataacaagaaaattgaaagatgggaaattagtggtggagtgtgtcatgaacaatgtcacctgtactcggatctatgaaaaagtagaataaaaattccatcatcactttggacaggagttaattaagagaatgaccaagctcagttcaatgagcaaatctccatactgtttctttcttttttttttcattactgtgttcaattatctttatcataaacattttacatgcagctatttcaaagtgtgttggattaattaggatcatccctttggttaataaataaatgtgtttgtgct

SEQ ID NO: 11 - DNA, 358 bp, Homo sapiens
  modified_base (62)..(62): a, c, t or g
  modified_base (357)..(357): a, c, t or g
gaggtattgatgactttattattctgcaggtacatgtccaggggcccagcctctgggcaagntaactcagctactctttgtggctttcttcatggctttttttgtgggctgccacgcccatctttatcaccagaatgaggaactcctggaagttaactgcaccatcagtgttgatatccaactctttgaaccagacgtctgcaccctttttcctgatatactgaggacactcggtctctagcaatttcttcaggtcatccctgtagacggcatggaaattcccctttatcaagggagtacttgtggtaaacgtcgatgatagagttcaaggctttctacagctcggtcaacatgatng

SEQ ID NO: 12 - DNA, 428 bp, Homo sapiens
atgtctcttgtcagctgtctttcagaagacctggtggggcaagtccgtgggcatcatgttgaccgagctggagaaagccttgaactctatcatcgacgtctaccacaagtactccctgataaaggggaatttccatgccgtctacagggatgacctgaagaaattgctagagaccgagtgtcctcagtatatcaggaaaaagggtgcagacgtctggttcaaagagttggatatcaacactgatggtgcagttaacttccaggagttcctcattctggtgataaagatgggcgtggcagcccacaaaaaaagccatgaagaaagccacaaagagtagctgagttactgggcccagaggctgggcccctggacatgtacctgcagaataataaagtcatcaatacctcaaaaaaaaaaaaaaaaaaaaa

SEQ ID NO: 13 - DNA, 537 bp, Homo sapiens
  modified_base (4)..(4): a, c, t or g
  modified_base (36)..(36): a, c, t or g
  modified_base (302)..(302): a, c, t or g
  modified_base (445)..(445): a, c, t or g
  modified_base (459)..(459): a, c, t or g
  modified_base (510)..(510): a, c, t or g
cgcnttattttagctgcaaagtggcatcatattatncatttaatgaaattcacctcaagccctttttgacatattaaatatatgggatatatttaaggcaagagaagtaaggcaatccaaatgagtgcccttttccaatctcagcactgtcttggtggaattggtgacactattcagataaccaactggagaccgacagatttgccatgcatttgcatcttgctagagtttggtttttatgaaagggcctatttttttttaagttgacatattttgagtggaaacactcaccctaccaaatntacttaagttgcaactctaaaagcataaggacattttcaaattttctcttcttccaactgagaaaatgaatgtgccagggggaccatattatatactttgtaccttgcattacaccatagggaatatatcaccttgtgccaanattccgtcctttgnctttatacctggaatttccccctcaaattttccattaattttgcagggccnaaattttttggggatgggggacccaat

SEQ ID NO: 14 - DNA, 551 bp, Homo sapiens
  modified_base (269)..(269): a, c, t or g
  modified_base (318)..(318): a, c, t or g
  modified_base (418)..(418): a, c, t or g
  modified_base (425)..(425): a, c, t or g
  modified_base (490)..(490): a, c, t or g
  modified_base (503)..(503): a, c, t or g
  modified_base (523)..(523): a, c, t or g
  modified_base (531)..(531): a, c, t or g
  modified_base (544)..(544): a, c, t or g
gacaccctaaccgtgatgggcattgcgtttgagcctttgtgatcggagcactcctgacgggggccttgtggtacatctattctcacacaggggagacagcaggaaggcagcaagtccccacctccccgccagcctcggaaaacagcagtgctgcccacagcatcggcagcacgcagagcacgccttgctccagcaggcagcacggcctagcccaacccagcccaacccggcccaacccagcccagcccagcttcagcttcagcttactnccaagggaggatccaatgggtgaggcttcgtgttccagactcagagggntggattttggttccctttgttaaaggacagagttgaattttcagtattaaagtttcaccctttgtatttcaccccacacccgggggttagttttaaaacntggaccngggggtttttgttaccacattaggattttcatgttgaggaaagttaaaattggttggtttttttncaccaggcccttnacaggtttggggggtttttnattgttgnaaacacttggccnttttttt

SEQ ID NO: 15 - DNA, 4199 bp, Homo sapiens
ggagggcagtcggcggctctcgcgccccggccactttccctgcgcgattcccggagctccctgcaggaggtgagagtccccagcgggtccggatggcgtagttttgccgcggcgcagcagctgccggagctcgccgccgccgagcgctgggcggggaaacttgccgccgctttcctccaacttgctgcgggtggatctccgctggacacaccgcctccgaggcagtttgaaaattgcaaggagggactttaagactacttctgatttgcaaagattgtctgtgctctgagcaggctgaagtgactggacgagacgcactgttggagaaataaaaatgacttcccattatgtgattgccatctttgccctgatgagctcctgtttagccactgcaggtccagagcctggtgcactgtgtgaactgtcacctgtcagtgcctcccatcctgtccaggccttgatggagagcttcactgttttgtcaggctgtgccagcagaggcacaactgggctgccacaggaggtgcatgtcctgaatctccgcactgcgggccaggggcctggccagctacagagagaggtcacacttcacctgaatcccatctcctcagtccacatccaccacaagtctgttgtgttcctgctcaactccccacaccccctggtgtggcatctgaagacagagagacttgccactggggtctccagactgtttttggtgtctgagggttctgtggtccagttttcatcagcaaacttctccttgacagcagaaacagaagaaaggaacttcccccatggaaatgaacatctgttaaattgggcccgaaaagagtatggagcagttacttcattcaccgaactcaagatagcaagaaacatttatattaaagtgggggaagatcaagtgttccctccaaagtgcaacatagggaagaattttctctcactcaattaccttgctgagtaccttcaacccaaagcagcagaagggtgtgtgatgtccagccagccccagaatgaggaagtacacatcatcgagctaatcacccccaactctaacccctacagtgctttccaggtggatataacaattgatataagaccttctcaagaggatcttgaagtggtcaaaaatctcatcctgatcttgaagtgcaaaaagtctgtcaactgggtgatcaaatcttttgatgttaagggaagcctgaaaattattgctcctaacagtattggctttggaaaagagagtgaaagatctatgacaatgaccaaatcaataagagatgacattccttcaacccaagggaatctggtgaagtgggctttggacaatggctatagtccaataacttcatacacaatggctcctgtggctaatagatttcatcttcggcttgaaaataatgcagaggagatgggagatgaggaagtccacactattcctcctgagctacggatcctgctggaccctggtgccctgcctgccctgcagaacccgcccatccggggaggggaaggccaaaatggaggccttccgtttcctttcccagatatttccaggagagtctggaatgaagagggagaagatgggctccctcggccaaaggaccctgtcattcccagcatacaactgtttcctggtctcagagagccagaagaggtgcaagggagcgtggatattgccctgtctgtcaaatgtgacaatgagaagatgatcgtggctgtagaaaaagattcttttcaggccagtggctactcggggatggacgtcaccctgttggatcctacctgcaaggccaagatgaatggcacacactttgttttggagtctcctctgaatggctgcggtactcggccccggtggtcagcccttgatggtgtggtctactataactccattgtgatacaggttccagcccttggggacagtagtggttggccagatggttatgaagatctggagtcaggtgataatggatttccgggagatatggatgaaggagatgcttccctgttcacccgacctgaaatcgtggtgtttaattgcagccttcagcaggtgaggaaccccagcagcttccaggaacagccccacggaaacatcaccttcaacatggagctatacaacactgacctctttttggtgccctcccagggcgtcttctctgtgccagagaatggacacgtttatgttgaggtatctgttactaaggctgaacaagaactgggatttgccatccaaacgtgctttatctctccatattcgaaccctgataggatgtctcattacaccattattgagaatatttgtcctaaagatgaatctgtgaaattctacagtcccaagagagtgcacttccctatcccgcaagctgacatggataagaagcgattcagctttgtcttcaagcctgtcttcaacacctcactgctctttctacagtgtgagctgacgctgtgtacgaagatggagaagcacccccagaagttgcctaagtgtgtgcctcctgacgaagcctgcacctcgctggacgcctcgataatctgggccatgatgcagaataagaagacgttcaccaagccccttgctgtgatccaccatgaagcagaatctaaagaaaaaggtccaagcatgaaggaaccaaatccaatttctccaccaattttccatggtctggacaccctaaccgtgatgggcattgcgtttgcagcctttgtgatcggagcactcctgacgggggccttgtggtacatctattctcacacaggggagacagcaggaaggcagcaagtccccacctccccgccagcctcggaaaacagcagtgctgcccacagcatcggcagcacgcagagcacgccttgctccagcagcagcacggcctagcccaacccagcccaacccggcccaacccagcccagcccagctcagctcagctactgccaagggcaggaccaatggctgagcctcgtgtccagactcagagggctggattttggttcccttgtaaagacagagtgaatttcagtataaagatcacccgttgtattcaccccacacccagggctagtataaacatgaccctgggcttctgtaccacactagaattcatgtgagaaagctaaaatggtggtcttctccaccagcccctcacaggcttgggggttttcaatgtgaaacacatgccagtttttaaaatgctgctttgtccaggtgagaacatccataatttggggccctgagttttacccagactcaaggagttggtaaagggttaatagccagatagtagaaccagtgaggagatgcggccaaagattctttatatctgaaccaagatgtaaaacaagaaatgctttgaggctttctaagcgatcctcctgtctaatttgcacctttgtctggatgcacacttctgaccttgctgccacaacctgtggggtctgatgtgtcccttgatgggtgctgccctcagggactgcaccctgacaagtgttaaggcaacattcctttcttgtgccctgggccaaaaccaatgctgatgaccttatcagcttcctgtttcttcccatacttgcatacaccactgcaaaatgtcttaatgcaaattttgtatttcttacaggcctacagaaattgaaaatgaccaaaatcaggaaccacagatttgtgcccattcctaatattttgttctgcaaattaatgtataatttgaggtgaaattcagttataaagtcaaggacgaatttgcacagtgatatatttctatgtgtatgcaagtacaagtatataatatgtcacctggcacattcattttctcagttgaagaagagaaaatttgaaaatgtccttatgcttttagagttgcaacttaagtatatttggtagggtgagtgtttccactcaaaatatgtcaacttaaaaaaaaataggccctttcataaaaaccaaactgtagcaagatgcaaatgcatggcaaatcctgtcggtctccagttggttatctgaatagtgtcaccaattccaccaagacagtgctgagattggaaaagggcactcatttggattgccttacttctcttgccttaaatatatcccatatatttaatatgtcaaaaagggcttgaggtgaatttcattaaatggaataatatgatgccactttgcagctaaaataagctcagtgatacctcct

SEQ ID NO: 16 - DNA, 529 bp, Homo sapiens
  modified_base (1)..(3): a, c, t or g
  modified_base (370)..(370): a, c, t or g
  modified_base (376)..(376): a, c, t or g
  modified_base (401)..(401): a, c, t or g
  modified_base (439)..(439): a, c, t or g
  modified_base (448)..(448): a, c, t or g
  modified_base (459)..(459): a, c, t or g
  modified_base (464)..(464): a, c, t or g
  modified_base (484)..(484): a, c, t or g
  modified_base (508)..(508): a, c, t or g
  modified_base (513)..(513): a, c, t or g
nnntcggcatcttgaagctgctgctctatttcgctctaaaaactttctccttttttcatcaggatcttcgttagctgctcttctccgacgaccacttgtactttgggtctgtggagttgtgtgagctggagaagccggagtttctgtagtggatgtggctggctgttgtaatgactgcggtcgagattcctctgactgagtcctaaccaatccgctaccatgacctttgacagtatcaccattggtaactggaggatgttgctggggtcaaagcagcttttaatctcatttttgcttctgactgtactgggttgggggagagggaagggacctgggggattcctggggaacactaggggcacccatgggngacctnggtccgaaacggagttggggacttncagcctaggaaccatgcacattaggaacttgtaatttnatgcagggnatagccaacangcatnggtttttcccttaggggagntttaacagaagagggaaatgggcntgggnacaggggacaattttt

SEQ ID NO: 17 - DNA, 335 bp, Homo sapiens
  modified_base (299)..(299): a, c, t or g
gtaccattggcacaaactgcacagcccacatcagctattgttcgtccagcatcattacaggttcccaatgtgctgcttacaagttctgactcaagtgtaattattcagcaggcagtaccttcaccaacctcaagtactgtaatcacccaggcaccatcctctaacaggccaattgtccctgtaccagggcccatttcctcttctgttacatcttcctaatgggacaaaccatgcctgttgctattcctggcatcaattacaagttctaatgtggcatgttctaggctggcagttcccantcgtttcggaccagttcaccatgggtggcctaggtg

SEQ ID NO: 18 - DNA, 2117 bp, Homo sapiens
gtgggagcccgtggcctttaaagtgccgttcagccttttcctccaggggtgctttgtaaacacggctgtgctcagggctcgcgggtgaccgaaaggatcatgaactagtgacctggaaagggtactagatggaaacttgagaaaggactgcttattgataacagctaaggtattcctggaagcagagtaaataaagctcatggcccaccagctagaaagtattcttgccatgagaaaaagaatgtgataagttattcaacttatgaaattcaagttacatgtgaattctgccaggcaatacaaggacctgtggaatatgagtgatgacaaaccctttctatgtactgcgcctggatgtggccagcgttttaccaacgaggatcatttggctgtccataaacataaacatgagatgacactgaaatttggtccagcacgtaatgacagtgtcattgtggctgatcagaccccaacaccaacaagattcttgaaaaactgtgaagaagtgggtttgtttaatgagttggcgagtccatttgagaatgaattcaagaaagcttcagaagatgacattaaaaaaatgcctctagatttatcccctcttgcaacacctatcataagaagcaaaattgaggagccttctgttgtagaaacaactcaccaggatagtcctttacctcacccagagtctactaccagtgatgagaaggaagtaccattggcacaaactgcacagcccacatcagctattgttcgtccagcatcattacaggttcccaatgtgctgcttacaagttctgactcaagtgtaattattcagcaggcagtaccttcaccaacctcaagtactgtaatcacccaggcaccatcctctaacaggccaattgtccctgtaccaggcccatttcctcttctgttacatcttcctaatggacaaaccatgcctgttgctattcctgcatcaattacaagttctaatgtgcatgttccagctgcagtcccactcgttcgaccagtcaccatggtgcctagtgttccaggaatcccaggtccttcctctccccaaccagtacagtcagaagcaaaaatgagattaaaagctgctttgacccagcaacatcctccagttaccaatggtgatactgtcaaaggtcatggtagcggattggttaggactcagtcagaggaatctcgaccgcagtcattacaacagccagccacatccactacagaaactccggcttctccagctcacacaactccacagacccaaagtacaagtggtcgtcggagaagagcagctaacgaagatcctgatgaaaaaaggagaaagtttttagagcgaaatagagcagcagcttcaagatgccgacaaaaaaggaaagtctgggttcagtctttagagaagaaagctgaagacttgagttcattaaatggtcagctgcagagtgaagtcaccctgctgagaaatgaagtggcacagctgaaacagcttcttctggctcataaagattgccctgtaaccgccatgcagaagaaatctggctatcatactgctgataaagatgatagttcagaagacatttcagtgccgagtagtccacatacagaagctatacagcatagttcggtcagcacatccaatggagtcagttcaacctccaaggcagaagctgtagccacttcagtcctcacccagatggcggaccagagtacagagcctgctctttcacagatcgttatggctccttcctcccagtcacagccctcaggaagttgattaaaaacctgcagtacaacagttttagatactcattagtgacttcaaagggaaatcaaggaaagaccagtttccatttatgcgaaatctgtggttgtaaattttttttttttacttgaaattaaatttggctctaaagttggtgtagcagcagttgatcagactgaaaaacggtttttagtctctggaaaaagactgattttgctttttttataaatattattagatttattaatttttctgtgctcaatgtgtaaattgtattataattcattgtgatttatttcacttttaatttgctggtgttttaataaatgggggtgttactgaaaaaaaa

SEQ ID NO: 19 - DNA, 405 bp, Homo sapiens
ttccaaaggaagcaagctttattgaatttacaacgtagaaaatatttgtagttccttagacatttgcattgctataaaaattacactttatggtataattattaaggtttgaagagaaataaacagtataaacgaaatatggcccacacaatgaaaatgtaaaccatataaatcaaaatcataaaacaattattcaatactcagaggcctacttaatatatacatatgaaatttcttacacacacacaataaatgcccacaaaaaccatcactgaagccgatcactgtacaaatatgaaaataaatctttatctttaacctcaattttatcttcagcaggagggttgtgcaacttgggtttatgcagatcacatcaagtgttaaataatcaaatgtcacatatgt

SEQ ID NO: 20 - DNA, 2770 bp, Homo sapiens
ctccttggcggtgcctggagcccgggcgcaccccaccgctcccgggacctgttgggggctggcccgaaccgtcgtcgaagggagccgctcggccacccccgacgttcctcgccccgcccgacgttccctcaagtggccgaaccagccggacgagccaaactcgccgggcctcccggcggcagcaggtggccccgtccttccagggagggccctgcgccccgcggcgctccggagccctctcggccgcccccgccaggcgggatggaggcggatggggacggagaggagctggcccggctgcgctcagtcttcgccgcctgcgacgcgaaccgctcggggcgcctggagcgcgaggagttccgggcactgtgcacggagctgcgggtgcggccggccgacgccgaggcagtattccagcggctggacgccgaccgtgacggcgccatcaccttccaggagttcgcgcgtggcttcctcgggtccctccgcggggggcggcgccgggactggggtcctctggatcccgcgcccgccgtgtctgaggcggggccggagacacacgacagcgaggaggacgaaggcgacgaggacgcggcggcggcgctggccacctcgtgcggcccggcgagtcccggccgggcttggcaggatttccaggcgcgacttggggacgaagccaagttcattcccagagaagagcaagttagtaccttgtaccaaaacatcaaccttgtggagccaagattaattcagccatatgaacatgttataaagaacttcatccgtgagatcagacttcaaagcacagaaatggaaaatttggccattgcggtgaagagagcccaggacaaggcagctatgcagttgagtgagttggaagaggaaatggatcagaggattcaggctgcagaacataagacacggaaagacgaaaaacgcaaagctgaggaagccctcagtgacctcagacgtcagtatgaaactgaagtaggagatctgcaggtgaccattaaaaagctaagaaagctcgaagaacaatcaaaacgcgtaagtcaaaaggaagatgtggctgcattgaaaaaacaaatttatgatttatcaatggaaaaccagaaagttaagaaagaccttttagaagcacagacaaacatagcctttcttcagagtgagttagatgctttgaaaagtgattatgctgatcagagtctgaatactgaaagggatctggaaataatccgagcatacacagaagatcgaaatagtcttgagaggcaaattgaaatactccaaacagctaaccggaagctacatgacagtaatgatggccttagaagtgcccttgaaaacagttatagcaagttcaacagatctttgcatataaataatatctcaccagggaatacaatttctagaagcagtcccaaattcattggtcattcccctcaacctctaggctatgacaggtcatcccgctcttcctatgtggatgaggactgtgactccctggccctctgtgatcctctgcagaggacaaattgtgaagttgacagcctgcctgaaagctgcttcgacagcggcttgtctaccttgagagatcccaatgagtatgactcagaagtggaatacaagcaccagaggggatttcagaggtcacacggggtgcaggagagctttggaggtgatgcttcagacacagatgttcctgacataagggatgaagagacatttggtttagaagatgtggcttccgtcttagactggaagccccaagggtctgttagtgaaggcagcattgttagttcatcaagaaagcccatctcagcactctcgccccagacagacctggtagatgacaacgctaaatcttttagctcacagaaggcttacaagattgtacttgctggggacgctgcagtggggaagtctagtttcctcatgagactttgcaagaatgaatttcgagaaaatataagcgccaccctgggagttgatttccaaatgaaaaccctcattgtggatggagaacgaacagttctgcagctctgggatacagctggtcaggagagattcagaagtattgccaagtcttacttcagaaaggcagatggtgttttgctgctgtatgatgttacatgtgagaaaagctttcttaacatacgagaatgggtagatatgattgaggatgcagcccatgagactgttcccattatgctggtaggaaacaaggctgacattcgtgacactgctgctacagagggacaaaaatgtgtcccagggcactttggagagaaactggccatgacgtatggggcattattctgtgaaacaagtgccaaagatggttctaacatagtggaggctgttctgcaccttgctcgagaagtgaaaaagagaactgacaaggatgacagcagatccattaccaatctaaccgggaccaattccaaaaagtcaccacagatgaagaattgttgcaatggctaaatcccaaacatccttggcctgtgaagtcttcatttccagaatactgaatttgtgtgacttatttggctcttaacagagtggcacatcctactgacactgtcctatggagagttacagtgcaggaaacctgaacccagctctcaggtccctctggaactttggctcttctttgttttgtctcagtgagtgatttgggccctctggctaaatagactagtcatgtccttacaggtcttaaaagataacatgtaaatgtttttaaaatggtaaaaaaaaaaaaaaaaaa

SEQ ID NO: 21 - DNA, 492 bp, Homo sapiens
  modified_base (142)..(142): a, c, t or g
  modified_base (252)..(252): a, c, t or g
  modified_base (303)..(303): a, c, t or g
  modified_base (320)..(320): a, c, t or g
  modified_base (338)..(338): a, c, t or g
  modified_base (347)..(347): a, c, t or g
  modified_base (437)..(437): a, c, t or g
  modified_base (446)..(446): a, c, t or g
  modified_base (458)..(458): a, c, t or g
  modified_base (471)..(471): a, c, t or g
  modified_base (476)..(476): a, c, t or g
  modified_base (482)..(482): a, c, t or g
tttttttgccacttcagctccaaaggtgaaacggcacagttaaaagcaagaaattttgtgtcccttccccaagctagctttggaataaatccacttttcttgtaccagaccccactcttgttaattggactctacatgtggnaagcaactaacttgattttcggttacaatataatattcaacttcagtaaatcaaagacaattttgaaagaagccaaagggaaaaaaatgacctgaagagtcctgtttaantttagatttctgaacacaaatctctggcgactaggactgaagcttgacctnttcctacccaggacccnttcccacctcactagggnactttggantgggatatatgtggggaaactcttgggctttccccattgtggcaccatttcatatcttatggcaaatggtgcctcctacctcccttgggncactccccngttggatgggtnttgggggaggagncctgntggggntttttcccat

SEQ ID NO: 22 - DNA, 662 bp, Homo sapiens
catctgaattttttaatccttctttacaggttacctagaccacttttgattaagaaaactgtagaaagttagtaactgccacaagcggacccagttggtggcacgtgtcaatttccacagagtcctgctttgcggggtgtctgaatgcactgctcggggtctctgctcaaacttgctggaatcactcatggcagattttagtccacaggtcgcttttccccatatttctttgtaaactcttcagcattcttacagaattttttacggtccttagagtattcttcagctaggtcagcccggagtgggtgctcaggctgggggtcattcaccagtgctatgagggactggattacttggtcagtcttggtggctggcttccagttttcagcactaatgactggcagacagacctgccccttctcatcgatgttagggtggtagatctttgttttaaatgtgatcttgggtggtttgaatggatactctgctggaaagttgatttcaattctgaaggctcccttatcatatggagggttgtcaggaacaataagcccttgccaagtcaataaattagcttcatcaacctggatgttacggaagtatttcattccacatttgcggatctcttcaagctccttcatcagcctcctgctggccgacat

SEQ ID NO: 23 - DNA, 606 bp, Homo sapiens
cagttctctagtatctttattatccattccacgggggcactcatggctgcacaactcaggggtgcagatgtctccctgcaccatgccaggtgtggtgcagaatgggaggcagggggatggagcagagagaggcctggactgcctgtggctcttgtcgagtcactgcccttctgtaggctctgctctggaaatgctggggtcagaggcaggtgttggggagcagccctgtctccctctgtcctccaggggagcagctgggcctgaggaggaagcacccctgccccagggtcccgaagccccagaggacccatatccccctggggcagttggttgcccctccctgaccttgggctctggaaggtcagagcagcagagcagactgcccgttttcccccatctcagggcctggctgaggcagggcaggcaggagagaggcccctgaggccgggtttcaggccctgggccaggcactcagatggggtgcacgaactggtagacgaggcgctgggaaatgtctggcttccggatgatgcccttcttgtaatactggccgatggagccgctcagcttgtcgtagttcatggcgggacgttcttgcggatcccc

SEQ ID NO: 24 - DNA, 514 bp, Homo sapiens
ggagggcatcttcaaaattgaggactcagcccaggtggcccggctgtggggcatccgcaagaaccgtcccgccatgaactacgacaagctgagccgctccatccgccagtattacaagaagggcatcatccggaagccagacatctcccagcgcctcgtctaccagttcgtgcaccccatctgagtgcctggaccagggcatgaaacccgccctcaggggcctctctcctgcctgccctgcctcagccaggccctgagatgggggaaaacgggcagtctgctctgctgctctgaccttccagagcccaaggtcagggaggggcaaccaactgccccagggggatatgggtcctctggggccttcgggaccatggggcaggggtgcttcctcctcaggcccagctgctcccctggaggacagagggagacagggctgctccccaacacctgcctctgaccccagcatttccagagcagagcctacagaagggcagtgactcgacaaaggccacag

SEQ ID NO: 25 - DNA, 1894 bp, Homo sapiens
gtctgacttcctcccagcacattcctgcactctgccgtgtccacactgccccacagacccagtcctccaagcctgctgccagctccctgcaagcccctcaggttgggccttgccacggtgccagcaggcagccctgggctgggggtaggggactccctacaggcacgcagccctgagacctcagagggccaccccttgagggtggccaggcccccagtggccaacctgagtgctgcctctgccaccagccctgctggcccctggttccgctggccccccagatgcctggctgagacacgccagtggcctcagctgcccacacctcttcccggcccctgaagttggcactgcagcagacagctccctgggcaccaggcagctaacagacacagccgccagcccaaacagcagcggcatgggcagcgccagcccgggtctgagcagcgtatcccccagccacctcctgctgccccccgacacggtgtcgcggacaggcttggagaaggcggcagcgggggcagtgggtctcgagagacgggactggagtcccagtccacccgccacgcccgagcagggcctgtccgccttctacctctcctactttgacatgctgtaccctgaggacagcagctgggcagccaaggcccctggggccagcagtcgggaggagccacctgaggagcctgagcagtgcccggtcattgacagccaagccccagcgggcagcctggacttggtgcccggcgggctgaccttggaggagcactcgctggagcaggtgcagtccatggtggtgggcgaagtgctcaaggacatcgagacggcctgcaagctgctcaacatcaccgcagatcccatggactggagccccagcaatgtgcagaagtggctcctgtggacagagcaccaataccggctgccccccatgggcaaggccttccaggagctggcgggcaaggagctgtgcgccatgtcggaggagcagttccgccagcgctcgcccctgggtggggatgtgctgcacgcccacctggacatctggaagtcagcggcctggatgaaagagcggacttcacctggggcgattcactactgtgcctcgaccagtgaggagagctggaccgacagcgaggtggactcatcatgctccgggcagcccatccacctgtggcagttcctcaaggagttgctactcaagccccacagctatggccgcttcattaggtggctcaacaaggagaagggcatcttcaaaattgaggactcagcccaggtggcccggctgtggggcatccgcaagaaccgtcccgccatgaactacgacaagctgagccgctccatccgccagtattacaagaagggcatcatccggaagccagacatctcccagcgcctcgtctaccagttcgtgcaccccatctgagtgcctggcccagggcctgaaacccgccctcaggggcctctctcctgcctgccctgcctcagccaggccctgagatgggggaaaacgggcagtctgctctgctgctctgaccttccagagcccaaggtcagggaggggcaaccaactgccccagggggatatgggtcctctggggccttcgggaccatggggcaggggtgcttcctcctcaggcccagctgctcccctggaggacagagggagacagggctgctccccaacacctgcctctgaccccagcatttccagagcagagcctacagaagggcagtgactcgacaaaggccacaggcagtccaggcctctctctgctccatccccctgcctcccattctgcaccacacctggcatggtgcagggagacatctgcacccctgagttgggcagccaggagtgcccccgggaatggataataaagatactagagaactg

SEQ ID NO: 26 - DNA, 405 bp, Homo sapiens
  modified_base (298)..(298): a, c, t or g
  modified_base (356)..(356): a, c, t or g
ttttaagcacaaattcattgcctttattctgatgagcttctcttcatgggatttacggacactgaattatatccagactctgctaacttcttggttttctccctcctatcgcctaatgactctttaagctactacatgagtctaatccatgggcatcctgagcttcacaaattcacgtcgcacccagcgagaaacccaccgtcttcactgagtcattcaaagcttcccactgctggaatggcatcgacatctggctccttcgccagtggtcatagcgggctcgactctcttcattggncagaatctcctttgccttctgcagtttctgaaaagtctccacagctttgggggttttnaggatgcttgtctggggtgacattccagagctctgactttaaattctgc

SEQ ID NO: 27 - DNA, 409 bp, Homo sapiens
  modified_base (365)..(365): a, c, t or g
  modified_base (400)..(400): a, c, t or g
gattaagtcatctaaatggatgcaatactgaattacaggtcagaagatactgaagattactacacattactgggatgtgatgaactatcttcggttgaacaaatcctggcagaatttaaagtcagagctctggaatgtcacccagacaagcatcctgaaaaccccaaagctgtggagacttttcagaaactgcagaaggcaaaggagattctgaccaatgaagagagtcgagcccgctatgaccactggcgaaggagccagatgtcgatgccattccagcagtgggaagctttgaatgactcagtgaagacggtgggtttctcgctgggtgcgacgttgaatttgttgaagctcagggttgcccntgggtttaggactcatgttagttaggctttaaagngttctttag

SEQ ID NO: 28 - DNA, 1218 bp, Homo sapiens
aaaggtctaggatgacatctggtgtattgactgtggccagtcttaaagctagtttttgctatgtggaacatgctgctctaattcagatttaaagagtttcttcctgttaattcgaagctcactgtgcctcttgtttccgagggaagaaggactgattaagtcatctaaatggatgcaatactgaattacaggtcagaagatactgaagattactacacattactgggatgtgatgaactatcttcggttgaacaaatcctggcagaatttaaagtcagagctctggaatgtcacccagacaagcatcctgaaaaccccaaagctgtggagacttttcagaaactgcagaaggcaaaggagattctgaccaatgaagagagtcgagcccgctatgaccactggcgaaggagccagatgtcgatgccattccagcagtgggaagctttgaatgactcagtgaagacgtcaatgcactgggttgtcagaggtaaaaaagacctgatgctggaagaatctgacaagactcataccaccaagatggaaaatgaggaatgtaatgagcaaagagaaagaaagaaagaggagctggcttcaaccgcagagaaaacggagcagaaagaacccaagcccctagagaagtcagtctccccgcaaaattcagattcttcaggttttgcagatgtgaatggttggcaccttcgtttccgctggtccaaggatgctccctcagaactcctgaggaagttcagaaactatgaaatatgaaatatctctgcttcaaaaaatgaggaagagcaagactgtcccctatgctgccaacatgcagtctttgtttatgtcttaaaaatgtcatgtttatgtcatgtctgtgaattgctgagtactaattgattcctccatccttgaatcagttctcataatgctttttaaataagaaaaattcagaagatgaatttcttccaatatttgaataaattaaagctcttagatacagagtagattgtattatatgctttttcctattaatactacttatagaaatccattaaaaagcaatctctgtacagtgtatttaaatatttcattgacatactgtgatctctattagtgatggatgtacaaaaaatgttttcttacccttgacttacaatgaaatgtgaaattacttgtctgaaccccgtggggagaaataaataattttcccaaagttcaaaaaaa

SEQ ID NO: 29 - DNA, 289 bp, Homo sapiens
  modified_base (278)..(278): a, c, t or g
tttttaagagtaaatgagtttatcagatccttcctgagaacaggtttttcagagaaagggtaagtggttgcacacaaaaaggcacttagctcctggccatggcagccggccagggaagggaggggagaaccaagcagggagacggggcacagggaagacgcacggcagctccttctcccctggccagagcgggcctcagtggctgggagcaggccccagggacaaagatgggtgggtccaggcctcagagaagggggacatcatagacaaagaggcantttcttgggag

SEQ ID NO: 30 - DNA, 293 bp, Homo sapiens
  modified_base (265)..(265): a, c, t or g
tacagcaggctccctcaaacgctccagccccaggaccatctcctttcggatgaaacccaagaaagaaaactcggaaacaaccctaactcgcagtgccagcatgaagctcccagacaacacagtgaagttgggagagaagctggagagataccacacggccatacggagatcagaatctgtcaagtctcggggtctgccttgcactgagttattcgtggctcctgtgggtgtagccagcaagcgccacctctttgagaaggaactnggcgggccaaagcccaggcaggaaccag

SEQ ID NO: 31 - DNA, 2869 bp, Homo sapiens
ggtccacccagtgcttgcggcctcgcggccgggccggcctgggctgcaatcaatgcggctttgtctgggacgcccacatcccagaggccattcccgggtcggcaaatcggagcgcggccggggcgcgcgggggtgagataagcggccatgtgatcccacctgggctggaaggggaggggcgccaggtgaggcggcggccggcggggcgcgggcggccacgcggggctcctgcagcatggctgtcagcaggaaggactggtccgcgctgtccagccttgcccggcagaggactctggaggatgaggaggaacaggagcgcgagcgcaggcggcggcaccgcaacctgagctccaccacggacgatgaggctcccaggctcagccagaatggagaccggcaggcctctgcttctgagagactaccgagcgtggaagaagcagaggtgcccaagccactgcccccagcctccaaagatgaggacgaggacatccagagcatcctcagaacacggcaggagcggaggcagaggcggcaggtggtggaggctgcacaggcccccatccaggagaggctggaggcagaggaggggaggaacagcttgagccctgtgcaggccacacagaaacccctagtctccaagaaggaactggaaatcccacctcgccggagactgagtcgggaacagcggggcccctgggccctggaggaggagagcttggtgggcagggagccagaagagaggaagaaaggggttccagaaaagtccccagtcttggagaagtcctccatgccaaagaagacggcacctgaaaagagcctggtctccgataaaacctccatctctgagaaggtgctggcctcagagaagacatctctatcagagaagatagcagtgtcagagaaaagaaacagctcagagaagaagtctgttctagaaaaaaccagtgtctctgagaagtcgctggccccagggatggcactgggctcaggaaggaggctggtgtctgagaaagcttccatctttgagaaggcactggcctcagagaagagcccaactgcagatgctaagccggccccaaagagggccacagcctcagagcagcccctggcgcaggagccgccagcctctgggggaagcccagccaccaccaaggagcagagaggaagggccctccctgggaagaacctgccctctttggcaaagcagggggcttcagaccctccgactgtggcctcccgcctcccacccgtcacactccaggtgaaaatccccagcaaggaggaagaggcagatatgtcctcacccacacagcgaacctacagcagctccctcaaacgctccagccccaggaccatctcctttcggatgaaacccaagaaagaaaactcggaaacaaccctaactcgcagtgccagcatgaagctcccagacaacacagtgaagttgggagagaagctggagagataccacacggccatacggagatcagaatctgtcaagtctcggggtctgccttgcactgagttattcgtggctcctgtgggtgtagccagcaagcgccacctctttgagaaggaactggcgggccagagccgagcagaaccagcctccagccggaaggagaacttgaggctctcaggggttgtgacatcaaggctcaacctgtggatcagcaggacccaggaatctggagatcaggacccccaggaggcacagaaagcatcatctgcaaccgagaggactcagtggggacagaaatctgactcctcgctggacgctgaggtgtgacaagccccgccaagacagacctgcaagtcttcgtctcaagggacctccctcatgccaggcccctgcctctcacagcagcaccctttcctctcattgtccctgttccctttttgcctgtggatctgtttggccagggtccctggggtcaggaatatttgcaagactcagccagctccttcccagcccagcctcttggggctgggactttctcaccctgcggcaggcacaacagatgctgggacccagtctctgcccaggtcacagcacaagtgcacatcagcactatggggcctatgtcctgcccagagacctctgctccttcctgctcacatccacagtcagggcacggcgcccctcaagaactccagagtcacctgtctcatcggctcccagcaagtgcctctttgtctatgatgtcccccttctctgaggcctggacccacccatctttgtccctggggcctgctcccagccactgaggcccgctctggccaggggagaaggagctgccgtgcgtcttccctgtgccccgtctccctgcttggttctcccctcccttccctggccggctgccatggccaggagctaagtgcctttttgtgtgcaaccacttaccctttctctgaaaaacctgttctcaggaaggatctgataaactcatttactctcaggtgtaagagactgatgagaccttagaagcgaattcctctctggaggccttgctttctagcagaggtcacctgaagtgtgtgaggaggatcatcattttcctcatcccccctcttctcacattaaggtggtggcttgccactcagcagtcctagcttggtgactgggaactgccacatacagggccaggcctaccctccttccccacaagccccctccaacccccacccccatgctctggacctcatggctcctatgagcttggagcatggtgaaccatcagagaatctagaaccaaccaagctaggaacatcagcctggtgccctgttaaccccttaaagctgtggtttacaacttttcaaaaatttaaatcattagaaaaaaaaaaaaaaaaaaaaaaaaaaaaaaaa

SEQ ID NO: 32 - DNA, 361 bp, Homo sapiens
  modified_base (3)..(3): a, c, t or g
  modified_base (328)..(328): a, c, t or g
tgnaggttgcctcagatttattttttaaaattaatgcaatataggaaaaattaacaatttttaaaatttcacttagaattcatagattacagctgttcagactctagtaggccccggtttgctgatctatgagcgatactggtttgtgtgtagccaaaaatccctacagaccagtggttgtcaggcgaggaaagttttataccccaggacatatttggcaacacctgagaacctttttgtttggcaccactcaggaagacgcgttactggcattgaggcaagggacagtgctgaacatcccacaatgtacagggacagcctcacagcnaaaggggtgacctgggccccacatgtcaggtag

SEQ ID NO: 33 - DNA, 353 bp, Homo sapiens
  modified_base (284)..(284): a, c, t or g
ggcacgaggccagatgccaccccgttccaggaaggtttgaggaccttcgaccagctggacgccatatctagtttgcccacacccagtgacatctttgtgtcctactctactttcccaggttttgtttcctgggagggaccccaagagtggctcctggtacgttgagaccctggacgacatctttgagcagtgggctcactcttgaagacctgcagtccctcctgcttaggggtcgctaatgctgttttcggtgaaagggatttattaaacagattgcctgggtngctttaattttcctcccgaaaaaactttttttttaaaacattcattaagggccaggggccccttcaccc

SEQ ID NO: 34 - DNA, 2034 bp, Homo sapiens
ggccctggggcgggggcgggtcctggggactggggcgggcggccgaggcccggaagcggactgaggcggcctggagtcttagttggctactcgccatggacgaagcggatcggcggctcctgcggcggtgccggctgcggctggtggaagagctgcaggtggaccagctctgggacgccctgctgagccgcgagctgttcaggccccatatgatcgaggacatccagcgggcaggctctggatctcggcgggatcaggccaggcagctgatcatagatctggagactcgagggagtcaggctcttcctttgttcatctcctgcttagaggacacaggccaggacatgctggcttcgtttctgcgaactaacaggcaagcagcaaagttgtcgaagccaaccctagaaaaccttaccccagtggtgctcagaccagagattcgcaaaccagaggttctcagaccggaaacacccagaccagtggacattggttctggaggatttggtgatgtcggtgctcttgagagtttgaggggaaatgcagatttggcttacatcctgagcatggagccctgtggccactgcctcattatcaacaatgtgaacttctgccgtgagtccgggctccgcacccgcactggctccaacatcgactgtgagaagttgcggcgtcgcttctcctcgctgcatttcatggtggaggtgaagggcgacctgactgccaagaaaatggtgctggctttgctggagctggcgcagcaggaccacggtgctctggactgctgcgtggtggtcattctctctcacggctgtcaggccagccacctgcagttcccaggggctgtctacggcacagatggatgccctgtgtcggtcgagaagattgtgaacatcttcaatgggaccagctgccccagcctgggagggaagcccaagctctttttcatccaggcctgtggtggggagcagaaagaccatgggtttgaggtggcctccacttcccctgaagacgagtcccctggcagtaaccccgagccagatgccaccccgttccaggaaggtttgaggaccttcgaccagctggacgccatatctagtttgcccacacccagtgacatctttgtgtcctactctactttcccaggttttgtttcctggagggaccccaagagtggctcctggtacgttgagaccctggacgacatctttgagcagtgggctcactctgaagacctgcagtccctcctgcttagggtcgctaatgctgtttcggtgaaagggatttataaacagatgcctggttgctttaatttcctccggaaaaaacttttctttaaaacatcataaggccagggcccctcaccctgccttatcttgcaccccaaagctttcctgccccaggcctgaaagaggctgaggcctggactttcctgcaactcaaggactttgcagccggcacagggtctgctctttctctgccagtgacagacaggctcttagcagcttccagattgacgacaagtgctgaacagtggaggaagagggacagatgaatgccgtggattgcacgtggcctcttgagcagtggctggtccagggctagtgacttgtgtcccatgatccctgtgttgtctctagagcagggattaacctctgcactactgacatgtggggccaggtcaccctttgctgtgaggctgtcctgtacattgtgggatgttcagcactgtcccttgcctcaatgccagtaacgcgtcttcctgagtggtgccaaacaaaaaggttctcaggtgttgccaaatatgtcctggggtataaaactttcctcgcctgacaaccactggtctgtagggatttttggctacacacaaaccagtatcgctcatagatcagcaaaccggggcctactagagtctgaacagctgtaatctatgaattctaagtgaaattttaaaaattgttaatttttcctatattgcattaattttaaaaaaaaaaaaaaaaaaaaaaaaaaaaaaaaaaaaaaaaaaaaaaa

SEQ ID NO: 35 - DNA, 413 bp, Homo sapiens
  modified_base (343)..(343): a, c, t or g
  modified_base (356)..(356): a, c, t or g
  modified_base (384)..(384): a, c, t or g
ttgctctttattttctacataataaaacttaatcactggggcacagggatgcacgcttgtaatcccagctactggggaagcttaggcaggacgactgtttgagctcaggagtttcagactgtagtgcattatgactgcacctgtgaatagccactgcattccagcccttagcgagaccttgcctcaagactttggggaggctatttcttaagcatatataaccaatccatttcagtgtcactatgggtgcttgtcaaggcccaatgctatccaaaaacacaggtaattattccctccctattttgggcaggattctgctggattctgattctgggccaggggnggaagggaggggngccattttaagggggagactttattacntgctttgctccatcactgtgctcctaaat

SEQ ID NO: 36 - DNA, 344 bp, Homo sapiens
agtaaaccagaagatttgaaggtggttaagaactgtgcaaataccacaagatcattttgtgacctcacagatgagtggagaagcacacacgaggcctatgtcaccgtcctagaaggattcagcgggaacacaacgttgttcagttgctcacacaatttctggctggccatagacatgtcttttgaaccaccagagtttgagattgttggttttaccaaccacatttaatgtgatgggtgaatttccatctattgtttgagggaaggaattacagttttgattttttctctcgtcattggaaggaacagttcagaggggatttgtttaaggaaggcattaaaccc

SEQ ID NO: 37 - DNA, 2898 bp, Homo sapiens
gcccgcgcttccgtatcgctcctcgtaggccggggctcggcgcgcgcacccgcactaaagacgcttcttcccggcgggtaggaatcccgccggcgagccgaacagttccccgagcgcagcccgcggaccaccacccggccgcacgggccgcttttgtcccccgcccgccgcttctgtccgagaggccgcccgcgaggcgcatcctgaccgcgagcgtcgggtcccagagccgggcgcggctggggcccgaggctagcatctctcgggagccgcaaggcgagagctgcaaagatgtaaaagtcaagagaagactctaaaaatagcaaagatgcttttgagccagaatgccttcatcttcagatcacttaatttggttctcatggtgtatatcagcctcgtgtttggtatttcatatgattcgcctgattacacagatgaatcttgcactttcaagatatcattgcgaaatttccggtccatcttatcatgggaattaaaaaaccactccattgtaccaactcactatacattgctgtatacaatcatgagtaaaccagaagatttgaaggtggttaagaactgtgcaaataccacaagatcattttgtgacctcacagatgagtggagaagcacacacgaggcctatgtcaccgtcctagaaggattcagcgggaacacaacgttgttcagttgctcacacaatttctggctggccatagacatgtcttttgaaccaccagagtttgagattgttggttttaccaaccacattaatgtgatggtgaaatttccatctattgttgaggaagaattacagtttgatttatctctcgtcattgaagaacagtcagagggaattgttaagaagcataaacccgaaataaaaggaaacatgagtggaaatttcacctatatcattgacaagttaattccaaacacgaactactgtgtatctgtttatttagagcacagtgatgagcaagcagtaataaagtctcccttaaaatgcaccctccttccacctggccaggaatcagaatcagcagaatctgccaaaataggaggaataattactgtgtttttgatagcattggtcttgacaagcaccatagtgacactgaaatggattggttatatatgcttaagaaatagcctccccaaagtcttgaattttcataactttttagcctggccatttcctaacctgccaccgttggaagccatggatatggtggaggtcatttacatcaacagaaagaagaaagtgtgggattataattatgatgatgaaagtgatagcgatactgaggcagcgcccaggacaagtggcggtggctataccatgcatggactgactgtcaggcctctgggtcaggcctctgccacctctacagaatcccagttgatagacccggagtccgaggaggagcctgacctgcctgaggttgatgtggagctccccacgatgccaaaggacagccctcagcagttggaactcttgagtgggccctgtgagaggagaaagagtccactccaggacccttttcccgaagaggactacagctccacggaggggtctgggggcagaattaccttcaatgtggacttaaactctgtgtttttgagagttcttgatgacgaggacagtgacgacttagaagcccctctgatgctatcgtctcatctggaagagatggttgacccagaggatcctgataatgtgcaatcaaaccatttgctggccagcggggaagggacacagccaacctttcccagcccctcttcagagggcctgtggtccgaagatgctccatctgatcaaagtgacacttctgagtcagatgttgaccttggggatggttatataatgagatgactccaaaactattgaatgaacttggacagacaagcacctacagggttctttgtctctgcatcctaacttgctgccttatcgtctgcaagtgttctccaagggaaggaggaggaaactgtggtgttcctttcttccaggtgacatcacctatgcacattcccagtatggggaccatagtatcattcagtgcattgtttacatattcaaagtggtgcactttgaaggaagcacatgtgcacctttcctttacactaatgcacttaggatgtttctgcatcatgtctaccagggagcagggttccccacagtttcagaggtggtccaggaccctatgatatttctcttctttcgttcttttttttttttttttttgagacagagtctcgttctgtcgcccaagctggagcgcaatggtgtgatcttggctcactgcaacatccgcctcccaggttcaagtgattctcctgcctcagcctccctcgcaagtagctgggattacaggcgcctgccaccatgcctagcaaatttttgtatttttagtagagacaggattttaccatgttggccaggctggtctcaaactcctgacctcaagtgatctgccctcctcagcctcgtaaagtgctgggattacaggggtgagccgctgtgcctggctggccctgtgatatttctgtgaaataaattgggccagggtgggagcagggaaagaaaaggaaaatagtagcaagagctgcaaagcaggcaggaagggaggaggagagccaggtgagcagtggagagaaggggggccctgcacaaggaaacagggaagagccatcgaagtttcagtcggtgagccttgggcacctcacccatgtcacatcctgtctcctgcaattggaattccaccttgtccagccctccccagttaaagtggggaagacagactttaggatcacgtgtgtgactaatacagaaaggaaacatggcgtcggggagagggataaaacctgaatgccatattttaagttaaaaaaaaa

SEQ ID NO: 38 - DNA, 376 bp, Homo sapiens
  modified_base (306)..(306): a, c, t or g
  modified_base (344)..(344): a, c, t or g
  modified_base (363)..(363): a, c, t or g
ttatagtgcttgtcattttaattgtaacatattaccaaaaagctttatatacatagctttatactatttacattgcagtagaggaatggcaatgctaacaggtgatcagtgcttccaaactttttcaatacctacacatgggagatctaaagagtacaatatatttaagacttctaaggaattgttttctcctcactaataaagcatgccctgactaaagagaagtcctgtagggcacagcctttatctattcaatgactgggcacctcccggggggtactgacacacaaagggccttcactgggnccttacaggttctcactgcccttggggctcccggtccngctttgggggctggggggncaggtcgggcctc

SEQ ID NO: 39 - DNA, 383 bp, Homo sapiens
  modified_base (2)..(2): a, c, t or g
  modified_base (322)..(322): a, c, t or g
  modified_base (339)..(339): a, c, t or g
  modified_base (364)..(364): a, c, t or g
  modified_base (374)..(374): a, c, t or g
tngttccttgcttataagccatgaaaagttagagaaagctaaagagatgttagagacacaagtggcccatctgtgttcacagcaatctaaacaagattcccgagggtctcctttgctaggtccagttgttccaggaccatctccaatcccttctgttactgaaaagaggttatcatctgggccaaaataaagcttcaggcaagaggcaaagatccagtggaatatgggagaatggtggaggaccaacacctgctaccccagagagcttttctaaaaaaagcaagaaagcagttcatgagtggttatttcaccctggcagganggacacgggaaggttanttgagtttttgaggccagaggggantttcccggangtttgttaa

SEQ ID NO: 40 - DNA, 10316 bp, Homo sapiens
gagaccagaagcgggcgaattgggcaccggtggcggctgcgggcagtttgaattagactctgggctccagcccgccgaagccgcgccagaactgtactctccgagaggtcgttttcccgtccccgagagcaagtttatttacaaatgttggagtaataaagaaggcagaacaaaatgagctgggctttggaagaatggaaagaagggctgcctacaagagctcttcagaaaattcaagagcttgaaggacagcttgacaaactgaagaaggaaaagcagcaaaggcagtttcagcttgacagtctcgaggctgcgctgcagaagcaaaaacagaaggttgaaaatgaaaaaaccgagggtacaaacctgaaaagggagaatcaaagattgatggaaatatgtgaaagtctggagaaaactaagcagaagatttctcatgaacttcaagtcaaggagtcacaagtgaatttccaggaaggacaactgaattcaggcaaaaaacaaatagaaaaactggaacaggaacttaaaaggtgtaaatctgagcttgaaagaagccaacaagctgcgcagtctgcagatgtctctctgaatccatgcaatacaccacaaaaaatttttacaactccactaacaccaagtcaatattatagtggttccaagtatgaagatctaaaagaaaaatataataaagaggttgaagaacgaaaaagattagaggcagaggttaaagccttgcaggctaaaaaagcaagccagactcttccacaagccaccatgaatcaccgcgacattgcccggcatcaggcttcatcatctgtgttctcatggcagcaagagaagaccccaagtcatctttcatctaattctcaaagaactccaattaggagagatttctctgcatcttacttttctggggaacaagaggtgactccaagtcgatcaactttgcaaatagggaaaagagatgctaatagcagtttctttgacaattctagcagtcctcatcttttggatcaattaaaagcgcagaatcaagagctaagaaacaagattaatgagttggaactacgcctgcaaggacatgaaaaagaaatgaaaggccaagtgaataagtttcaagaactccaactccaactggagaaagcaaaagtggaattaattgaaaaagagaaagttttgaacaaatgtagggatgaactagtgagaacaacagcacaatacgaccaggcgtcaaccaagtatactgcattggaacaaaaactgaaaaaattgacggaagatttgagttgtcagcgacaaaatgcagaaagtgccagatgttctctggaacagaaaattaaggaaaaagaaaaggagtttcaagaggagctctcccgtcaacagcgttctttccaaacactggaccaggagtgcatccagatgaaggccagactcacccaggagttacagcaagccaagaatatgcacaacgtcctgcaggctgaactggataaactcacatcagtaaagcaacagctagaaaacaatttggaagagtttaagcaaaagttgtgcagagctgaacaggcgttccaggcgagtcagatcaaggagaatgagctgaggagaagcatggaggaaatgaagaaggaaaacaacctccttaagagtcactctgagcaaaaggccagagaagtctgccacctggaggcagaactcaagaacatcaaacagtgtttaaatcagagccagaattttgcagaagaaatgaaagcgaagaatacctctcaggaaaccatgttaagagatcttcaagaaaaaataaatcagcaagaaaactccttgactttagaaaaactgaagcttgctgtggctgatctggaaaagcagcgagattgttctcaagaccttttgaagaaaagagaacatcacattgaacaacttaatgataagttaagcaagacagagaaagagtccaaagccttgctgagtgctttagagttaaaaaagaaagaatatgaagaattgaaagaagagaaaactctgttttcttgttggaaaagtgaaaacgaaaaacttttaactcagatggaatcagaaaaggaaaacttgcagagtaaaattaatcacttggaaacttgtctgaagacacagcaaataaaaagtcatgaatacaacgagagagtaagaacgctggagatggacagagaaaacctaagtgtcgagatcagaaaccttcacaacgtgttagacagtaagtcagtggaggtagagacccagaaactagcttatatggagctacagcagaaagctgagttctcagatcagaaacatcagaaggaaatagaaaatatgtgtttgaagacttctcagcttactgggcaagttgaagatctagaacacaagcttcagttactgtcaaatgaaataatggacaaagaccggtgttaccaagacttgcatgccgaatatgagagcctcagggatctgctaaaatccaaagatgcttctctggtgacaaatgaagatcatcagagaagtcttttggcttttgatcagcagcctgccatgcatcattcctttgcaaatataattggagaacaaggaagcatgccttcagagaggagtgaatgtcgtttagaagcagaccaaagtccgaaaaattctgccatcctacaaaatagagttgattcacttgaattttcattagagtctcaaaaacagatgaactcagacctgcaaaagcagtgtgaagagttggtgcaaatcaaaggagaaatagaagaaaatctcatgaaagcagaacagatgcatcaaagttttgtggctgaaacaagtcagcgcattagtaagttacaggaagacacttctgctcaccagaatgttgttgctgaaaccttaagtgcccttgagaacaaggaaaaagagctgcaacttttaaatgataaggtagaaactgagcaggcagagattcaagaattaaaaaagagcaaccatctacttgaagactctctaaaggagctacaacttttatccgaaaccctaagcttggagaagaaagaaatgagttccatcatttctctaaataaaagggaaattgaagagctgacccaagagaatgggactcttaaggaaattaatgcatccttaaatcaagagaagatgaacttaatccagaaaagtgagagttttgcaaactatatagatgaaagggagaaaagcatttcagagttatctgatcagtacaagcaagaaaaacttattttactacaaagatgtgaagaaaccggaaatgcatatgaggatcttagtcaaaaatacaaagcagcacaggaaaagaattctaaattagaatgcttgctaaatgaatgcactagtctttgtgaaaataggaaaaatgagttggaacagctaaaggaagcatttgcaaaggaacaccaagaattcttaacaaaattagcatttgctgaagaaagaaatcagaatctgatgctagagttggagacagtgcagcaagctctgagatctgagatgacagataaccaaaacaattctaagagcgaggctggtggtttaaagcaagaaatcatgactttaaaggaagaacaaaacaaaatgcaaaaggaagttaatgacttattacaagagaatgaacagctgatgaaggtaatgaagactaaacatgaatgtcaaaatctagaatcagaaccaattaggaactctgtgaaagaaagagagagtgagagaaatcaatgtaattttaaacctcagatggatcttgaagttaaagaaatttctctagatagttataatgcgcagttggtgcaattagaagctatgctaagaaataaggaattaaaacttcaggaaagtgagaaggagaaggagtgcctgcagcatgaattacagacaattagaggagatcttgaaaccagcaatttgcaagacatgcagtcacaagaaattagtggccttaaagactgtgaaatagatgcggaagaaaagtatatttcagggcctcatgagttgtcaacaagtcaaaacgacaatgcacaccttcagtgctctctgcaaacaacaatgaacaagctgaatgagctagagaaaatatgtgaaatactgcaggctgaaaagtatgaactcgtaactgagctgaatgattcaaggtcagaatgtatcacagcaactaggaaaatggcagaagaggtagggaaactactaaatgaagttaaaatattaaatgatgacagtggtcttctccatggtgagttagtggaagacataccaggaggtgaatttggtgaacaaccaaatgaacagcaccctgtgtctttggctccattggacgagagtaattcctacgagcacttgacattgtcagacaaagaagttcaaatgcactttgccgaattgcaagagaaattcttatctttacaaagtgaacacaaaattttacatgatcagcactgtcagatgagctctaaaatgtcagagctgcagacctatgttgactcattaaaggccgaaaatttggtcttgtcaacgaatctgagaaactttcaaggtgacttggtgaaggagatgcagctgggcttggaggaggggctcgttccatccctgtcatcctcttgtgtgcctgacagctctagtcttagcagtttgggagactcctccttttacagagctcttttagaacagacaggagatatgtctcttttgagtaatttagaaggggctgtttcagcaaaccagtgcagtgtagatgaagtattttgcagcagtctgcaggaggagaatctgaccaggaaagaaaccccttcggccccagcgaagggtgttgaagagcttgagtccctctgtgaggtgtaccggcagtccctcgagaagctagaagagaaaatggaaagtcaagggattatgaaaaataaggaaattcaagagctcgagcagttattaagttctgaaaggcaagagcttgactgccttaggaagcagtatttgtcagaaaatgaacagtggcaacagaagctgacaagcgtgactctggagatggagtccaagttggcggcagaaaagaaacagacggaacaactgtcacttgagctggaagtagcacgactccagctacaaggtctggacttaagttctcggtctttgcttggcatcgacacagaagatgctattcaaggccgaaatgagagctgtgacatatcaaaagaacatacttcagaaactacagaaagaacaccaaagcatgatgttcatcagatttgtgataaagatgctcagcaggacctcaatctagacattgagaaaataactgagactggtgcagtgaaacccacaggagagtgctctggggaacagtccccagataccaattatgagcctccaggggaagataaaacccagggctcttcagaatgcatttctgaattgtcattttctggtcctaatgctttggtacctatggatttcctggggaatcaggaagatatccataatcttcaactgcgggtaaaagagacatcaaatgagaatttgagattacttcatgtgatagaggaccgtgacagaaaagttgaaagtttgctaaatgaaatgaaagaattagactcaaaactccatttacaggaggtacaactaatgaccaaaattgaagcatgcatagaattggaaaaaatagttggggaacttaagaaagaaaactcagatttaagtgaaaaattggaatatttttcttgtgatcaccaggagttactccagagagtagaaacttctgaaggcctcaattctgatttagaaatgcatgcagataaatcatcacgtgaagatattggagataatgtggccaaggtgaatgacagctggaaggagagatttcttgatgtggaaaatgagctgagtaggatcagatcggagaaagctagcattgagcatgaagccctctacctggaggctgacttagaggtagttcaaacagagaagctatgtttagaaaaagacaatgaaaataagcagaaggttattgtctgccttgaagaagaactctcagtggtcacaagtgagagaaaccagcttcgtggagaattagatactatgtcaaaaaaaaccacggcactggatcagttgtctgaaaaaatgaaggagaaaacacaagagcttgagtctcatcaaagtgagtgtctccattgcattcaggtggcagaggcagaggtgaaggaaaagacggaactccttcagactttgtcctctgatgtgagtgagctgttaaaagacaaaactcatctccaggaaaagctgcagagtttggaaaaggactcacaggcactgtctttgacaaaatgtgagctggaaaaccaaattgcacaactgaataaagagaaagaattgcttgtcaaggaatctgaaagcctgcaggccagactgagtgaatcagattatgaaaagctgaatgtctccaaggccttggaggccgcactggtggagaaaggtgagttcgcattgaggctgagctcaacacaggaggaagtgcatcagctgagaagaggcatcgagaaactgagagttcgcattgaggccgatgaaaagaagcagctgcacatcgcagagaaactgaaagaacgcgagcgggagaatgattcacttaaggataaagttgagaaccttgaaagggaattgcagatgtcagaagaaaaccaggagctagtgattcttgatgccgagaattccaaagcagaagtagagactctaaaaacacaaatagaagagatggccagaagcctgaaagtttttgaattagaccttgtcacgttaaggtctgaaaaagaaaatctgacaaaacaaatacaagaaaaacaaggtcagttgtcagaactagacaagttactctcttcatttaaaagtctgttagaagaaaaggagcaagcagagatacagatcaaagaagaatctaaaactgcagtggagatgcttcagaatcagttaaaggagctaaatgaggcagtagcagccttgtgtggtgaccaagaaattatgaaggccacagaacagagtctagacccaccaatagaggaagagcatcagctgagaaatagcattgaaaagctgagagcccgcctagaagctgatgaaaagaagcagctctgtgtcttacaacaactgaaggaaagtgagcatcatgcagatttacttaagggtagagtggagaaccttgaaagagagctagagatagccaggacaaaccaagagcatgcagctcttgaggcagagaattccaaaggagaggtagagaccctaaaagcaaaaatagaagggatgacccaaagtctgagaggtctggaattagatgttgttactataaggtcagaaaaagaaaatctgacaaatgaattacaaaaagagcaagagcgaatatctgaattagaaataataaattcatcatttgaaaatattttgcaagaaaaagagcaagagaaagtacagatgaaagaaaaatcaagcactgccatggagatgcttcaaacacaattaaaagagctcaatgagagagtggcagccctgcataatgaccaagaagcctgtaaggccaaagagcagaatcttagtagtcaagtagagtgtcttgaacttgagaaggctcagttgctacaaggccttgatgaggccaaaaataattatattgttttgcaatcttcagtgaatggcctcattcaagaagtagaagatggcaagcagaaactggagaagaaggatgaagaaatcagtagactgaaaaatcaaattcaagaccaagagcagcttgtctctaaactgtcccaggtggaaggagagcaccaactttggaaggagcaaaacttagaactgagaaatctgacagtggaattggagcagaagatccaagtgctacaatccaaaaatgcctctttgcaggacacattagaagtgctgcagagttcttacaagaatctagagaatgagcttgaattgacaaaaatggacaaaatgtcctttgttgaaaaagtaaacaaaatgactgcaaaggaaactgagctgcagagggaaatgcatgagatggcacagaaaacagcagagctgcaagaagaactcagtggagagaaaaataggctagctggagagttgcagttactgttggaagaaataaagagcagcaaagatcaattgaaggagctcacactagaaaatagtgaattgaagaagagcctagattgcatgcacaaagaccaggtggaaaaggaagggaaagtgagagaggaaatagctgaatatcagctacggcttcatgaagctgaaaagaaacaccaggctttgcttttggacacaaacaaacagtatgaagtagaaatccagacataccgagagaaattgacttctaaagaagaatgtctcagttcacagaagctggagatagaccttttaaagtctagtaaagaagagctcaataattcattgaaagctactactcagattttggaagaattgaagaaaaccaagatggacaatctaaaatatgtaaatcagttgaagaaggaaaatgaacgtgcccaggggaaaatgaagttgttgatcaaatcctgtaaacagctggaagaggaaaaggagatactgcagaaagaactctctcaacttcaagctgcacaggagaagcagaaaacaggtactgttatggataccaaggtcgatgaattaacaactgagatcaaagaactgaaagaaactcttgaagaaaaaaccaaggaggcagatgaatacttggataagtactgttccttgcttataagccatgaaaagttagagaaagctaaagagatgttagagacacaagtggcccatctgtgttcacagcaatctaaacaagattcccgagggtctcctttgctaggtccagttgttccaggaccatctccaatcccttctgttactgaaaagaggttatcatctggccaaaataaagcttcaggcaagaggcaaagatccagtggaatatgggagaatggtagaggaccaacacctgctaccccagagagcttttctaaaaaaagcaagaaagcagtcatgagtggtattcaccctgcagaagacacggaaggtactgagtttgagccagagggacttccagaagttgtaaagaaagggtttgctgacatcccgacaggaaagactagcccatatatcctgcgaagaacaaccatggcaactcggaccagcccccgcctggctgcacagaagttagcgctatccccactgagtctcggcaaagaaaatcttgcagagtcctccaaaccaacagctggtggcagcagatcacaaaaggtcaaagttgctcagcggagcccagtagattcaggcaccatcctccgagaacccaccacgaaatccgtcccagtcaataatcttcctgagagaagtccgactgacagccccagagagggcctgagggtcaagcgaggccgacttgtccccagccccaaagctggactggagtccaacggcagtgagaactgtaaggtccagtgaaggcactttgtgtgtcagtacccctgggaggtgccagtcattgaatagataaggctgtgcctacaggacttctctttagtcagggcatgctttattagtgaggagaaaacaattccttagaagtcttaaatatattgtactctttagatctcccatgtgtaggtattgaaaaagtttggaagcactgatcacctgttagcattgccattcctctactgcaatgtaaatagtataaagctatgtatataaagctttttggtaatatgttacaattaaaatgacaagcactatatcacaatctctgtttgtatgtgggttttacactaaaaaaatgcaaaacacattttattcttctaattaacagctcctaggaaaatgtagacttttgctttatgatattctatctgtagtatgaggcatggaatagttttgtatcgggaatttctcagagctgagtaaaatgaaggaaaagcatgttatgtgtttttaaggaaaatgtgcacacatatacatgtaggagtgtttatctttctcttacaatctgttttagacatctttgcttatgaaacctgtacatatgtgtgtgtgggtatgtgtttatttccagtgagggctgcaggcttcctagaggtgtgctataccatgcgtctgtcgttgtgcttttttctgtttttagaccaattttttacagttctttggtaagcattgtcgtatctggtgatggattaacatatagcctttgttttctaataaaatagtcgccttcgttttctgtaaaaaaaaaaaaaaaaaaaaaa

SEQ ID NO: 41 - DNA, 438 bp, Homo sapiens
  modified_base (134)..(134): a, c, t or g
  modified_base (206)..(206): a, c, t or g
ttttgcagcttgtgcacttcttttattattaaatatataagcagcttcctatcttttaaatagatatttaaatgactttatataaaataattcaccacttccaagtataaaaacaaaatctcacagtgcgtgancaatgtcctctcttgacttctcagagaacagaaggggttcctgagcaggtagcctggggggacaccagaggngcctctggggctcctcctgctctgatgccaccaagtgctcaaaaagagcttctgcagtggggttgggattgcttttttgacctttaaaatattatatgtttaaggtagggggggatgaaggggggaatgccctttttatttttcttcccattttaaaaatatgtgttttctaggcatccaaatatagggggctgtggcctgggagggctaggccccctttgccaggttcact

SEQ ID NO: 42 - DNA, 2749 bp, Homo sapiens
gagggctggccagtgaggctcggcccggggaaagtgaaagtttgcctgggtcctctcggcgccagagccgctctccgcatcccaggacagcggtgcggccctcggccggggcgcccactccgcagcagccagcgagcgagcgagcgagcgagggcggccgacgcgcccggccgggacccagctgcccgtatgaccgcgccgggcgccgccgggcgctgccctcccacgacatggctgggctccctgctgttgttggtctgtctcctggcgagcaggagtatcaccgaggaggtgtcggagtactgtagccacatgattgggagtggacacctgcagtctctgcagcggctgattgacagtcagatggagacctcgtgccaaattacatttgagtttgtagaccaggaacagttgaaagatccagtgtgctaccttaagaaggcatttctcctggtacaagacataatggaggacaccatgcgcttcagagataacacccccaatgccatcgccattgtgcagctgcaggaactctctttgaggctgaagagctgcttcaccaaggattatgaagagcatgacaaggcctgcgtccgaactttctatgagacacctctccagttgctggagaaggtcaagaatgtctttaatgaaacaaagaatctccttgacaaggactggaatattttcagcaagaactgcaacaacagctttgctgaatgctccagccaagatgtggtgaccaagcctgattgcaactgcctgtaccccaaagccatccctagcagtgacccggcctctgtctcccctcatcagcccctcgccccctccatggcccctgtggctggcttgacctgggaggactctgagggaactgagggcagctccctcttgcctggtgagcagcccctgcacacagtggatccaggcagtgccaagcagcggccacccaggagcacctgccagagctttgagccgccagagaccccagttgtcaaggacagcaccatcggtggctcaccacagcctcgcccctctgtcggggccttcaaccccgggatggaggatattcttgactctgcaatgggcactaattgggtcccagaagaagcctctggagaggccagtgagattcccgtaccccaagggacagagctttccccctccaggccaggagggggcagcatgcagacagagcccgccagacccagcaacttcctctcagcatcttctccactccctgcatcagcaaagggccaacagccggcagatgtaactggtacagccttgcccagggtgggccccgtgaggcccactggccaggactggaatcacaccccccagaagacagaccatccatctgccctgctcagagaccccccggagccaggctctcccaggatctcatcactgcgcccccagggcctcagcaacccctccaccctctctgctcagccacagctttccagaagccactcctcgggcagcgtgctgccccttggggagctggagggcaggaggagcaccagggatcggaggagccccgcagagccagaaggaggaccagcaagtgaaggggcagccaggcccctgccccgttttaactccgttcctttgactgacacaggccatgagaggcagtccgagggatcctccagcccgcagctccaggagtctgtcttccacctgctggtgcccagtgtcatcctggtcttgctggccgtcggaggcctcttgttctacaggtggaggcggcggagccatcaagagcctcagagagcggattctcccttggagcaaccagagggcagccccctgactcaggatgacagacaggtggaactgccagtgtagagggaattctaagctggacgcacagaacagtctctccgtgggaggagacattatggggcgtccaccaccacccctccctggccatcctcctggaatgtggtctgccctccaccagagctcctgcctgccaggactggaccagagcagccaggctggggcccctctgtctcaacccgcagacccttgactgaatgagagaggccagaggatgctccccatgctgccactatttattgtgagccctggaggctcccatgtgcttgaggaaggctggtgagcccggctcaggaccctcttccctcaggggctgcaccctcctctcactcccttccatgccggaacccaggccagggacccaccggcctgtggtttgtgggaaagcagggtggacgctgaggagtgaaagaaccctgcacccagagggcctgcctggtgccaaggtatcccagcctggacaggcatggacctgtctccagagagaggagcctgaagttcgtggggcgggacagcgtcggcctgatttcccgtaaaggtgtgcagcctgagagacgggaagaggaggcctctggacctgctggtctgcactgacagcctgaagggtctacaccctcggctcacctaagtgccctgtgctggttgccaggcgcagaggggaggccagccctgccctcaggacctgcctgacctgccagtgatgccaagagggggatcaagcactggcctctgcccctcctccttccagcacctgccagagcttctccaggaggccaagcagaggctcccctcatgaaggaagccattgcactgtgaacactgtacctgcctgctgaacagcctgcccccgtccatccatgagccagcatccgtccgtcctccactctccagcctctcccca

SEQ ID NO: 43 - DNA, 83 bp, Homo sapiens
  modified_base (1)..(1): a, c, t or g
  modified_base (16)..(16): a, c, t or g
  modified_base (20)..(20): a, c, t or g
  modified_base (27)..(27): a, c, t or g
  modified_base (30)..(30): a, c, t or g
  modified_base (35)..(35): a, c, t or g
  modified_base (42)..(42): a, c, t or g
  modified_base (44)..(44): a, c, t or g
  modified_base (47)..(47): a, c, t or g
  modified_base (64)..(64): a, c, t or g
  modified_base (68)..(68): a, c, t or g
ngggagaccacgtttnattnagtccanttnagganccccgcnanctnagggctctctgggccantccncccgggagcccccac

SEQ ID NO: 44 - DNA, 404 bp, Homo sapiens
  modified_base (329)..(329): a, c, t or g
  modified_base (339)..(339): a, c, t or g
  modified_base (378)..(378): a, c, t or g
aaacggaagcagcctctcgatataacctgacgatctcagacgtcagcgtgagtgatgtgccatttcctttctctgcccagtctggggctggggtgccaggctggggcatcgcgctgctggtgctggtctgtgttctggttgcgctggccattgtctatctcattgccttggctgtctgtcagtgccgccgaaagaactacgggcagctggacatctttccagcccgggatacctaccatcctatgagcgagtaccccacctaccacacccatggggcgctatgtgccccctaggcagtaccgatcgtagcccctatgagaaggtttttngcaggtaatnggttggcagcagctttttttacaaaaaacccaggcagtnggcagccatttttgtccaatttttag

SEQ ID NO: 45 - DNA, 1209 bp, Homo sapiens
acctctcaagcagccagcgcctgcctgaatctgttctgccccctccccacccatttcaccaccaccatgacaccgggcacccagtctcctttcttcctgctgctgctcctcacagtgcttacagttgttacgggttctggtcatgcaagctctaccccaggtggagaaaaggagacttcggctacccagagaagttcagtgcccagctctactgagaagaatgctttgtctactggggtctctttctttttcctgtcttttcacatttcaaacctccagtttaattcctctctggaagatcccagcaccgactactaccaagagctgcagagagacatttctgaaatgtttttgcagatttataaacaagggggttttctgggcctctccaatattaagttcaggccaggatctgtggtggtacaattgactctggccttccgagaaggtaccatcaatgtccacgacgtggagacacagttcaatcagtataaaacggaagcagcctctcgatataacctgacgatctcagacgtcagcgtgagtgatgtgccatttcctttctctgcccagtctggggctggggtgccaggctggggcatcgcgctgctggtgctggtctgtgttctggttgcgctggccattgtctatctcattgccttggctgtctgtcagtgccgccgaaagaactacgggcagctggacatctttccagcccgggatacctaccatcctatgagcgagtaccccacctaccacacccatgggcgctatgtgccccctagcagtaccgatcgtagcccctatgagaaggtttctgcaggtaatggtggcagcagcctctcttacacaaacccagcagtggcagccacttctgccaacttgtaggggcacgtcgcccgctgagctgagtggccagccagtgccattccactccactcaggttcttcagggccagagcccctgcaccctgtttgggctggtgagctgggagttcaggtgggctgctcacagcctccttcagaggccccaccaatttctcggacacttctcagtgtgtggaagctcatgtgggcccctgagggctcatgcctgggaagtgttgtggtgggggctcccaggaggactggcccagagagccctgagatagcggggatcctgaactggactgaataaaacgtggtctcccactgcgccaaaaaaaaaaaa

SEQ ID NO: 46 - DNA, 428 bp, Homo sapiens
  modified_base (1)..(1): a, c, t or g
  modified_base (371)..(371): a, c, t or g
  modified_base (407)..(407): a, c, t or g
  modified_base (428)..(428): a, c, t or g
nttttcattcaagtatattaatgtagatattttaaagtgggttataagtttaacattgtctttaaaatagaagtcacagctatcttccagcctgtcttctctaggaacgctgttgacatgccagggctccgtctacactggaagcagctatacagctgtgaccacatcgagctttagccagtcacacttctggaactgtccgttcagtccatcccctcaagggttcttacatttctggctaagctcctcacgtaggtgcgtaggttctggttaataaaattcactgttgtgtgaaagacatcacggagcaaggacggcgtgtgactgggccaccttcttgggccagcagcaggggccagcaccagcatggnctttctccttctccatgtctctaggggtagggcctncagcagctgctccaggggcan

SEQ ID NO: 47 - DNA, 420 bp, Homo sapiens
  modified_base (350)..(350): a, c, t or g
  modified_base (403)..(403): a, c, t or g
  modified_base (408)..(408): a, c, t or g
actgaccgtagcatccctccgggcctggtgaacggcctggccctgcagctcaggaacaccagccggtcggaggaggaccggaacagggacctggccactgccctggagcagctgctgcaggcctaccctagagacatggagaaggagaagaccatgctggtgctggccctgctgctggccaagaaggtggccagtcacacgccgtccttgctccgtgatgtctttcacacaacagtgaattttattaaccagaacctacgcacctacgtgaggagcttagccagaaatgtaagaacccttgaggggatgggactgaacggacagttccagaagtgttgactggctaaagntcgatgttggtcacagctgtattagctgctttccagttttagacgggagcctnggatnttcaacagcgtt

SEQ ID NO: 48 - DNA, 2506 bp, Homo sapiens
aaaacccgcgggcctggccgggtgcaggccacccttgccggcggatcggaatccccgcccacaccgtggtctttccagcaccgcagacacctgccggctcctcccgagcggagctcagggctgacaaagcgcggtcagagcggccgcttactggggctcgcccgctccttagagcactggcaatgatgtgcggatcctcgctgctgctgctgggaaactgttgagtggctgaatgaccccaggggaccctgggagagctctgaagccctcagccaccaagtggctgggctggcaagggttcattcattcattcaacaaatacgaatgtgcagcggtgctggggtcatgatggctcggtgggcagcgaggggccgggccggctggaggagcacagtgcggattctgtcgccactgggacactgtgaaccaggagtgagtcggagctgccgcgctgcccaggccatggactgtgaggtcaacaacggttccagcctcagggatgagtgcatcacaaacctactggtgtttggcttcctccaaagctgttctgacaacagcttccgcagagagctggacgcactgggccacgagctgccagtgctggctccccagtgggagggctacgatgagctgcagactgatggcaaccgcagcagccactcccgcttgggaagaatagaggcagattctgaaagtcaagaagacatcatccggaatattgccaggcacctcgcccaggtcggggacagcatggaccgtagcatccctccgggcctggtgaacggcctggccctgcagctcaggaacaccagccggtcggaggaggaccggaacagggacctggccactgccctggagcagctgctgcaggcctaccctagagacatggagaaggagaagaccatgctggtgctggccctgctgctggccaagaaggtggccagtcacacgccgtccttgctccgtgatgtctttcacacaacagtgaattttattaaccagaacctacgcacctacgtgaggagcttagccagaaatgggatggactgaacggacagttccagaagtgtgactggctaaagctcgatgtggtcacagctgtatagctgcttccagtgtagacggagccctggcatgtcaacagcgttcctagagaagacaggctggaagatagctgtgacttctattttaaagacaatgttaaacttataacccactttaaaatatctacattaatatacttgaatgaaaatgtccatttacacgtatttgaatggccttcatatcatccacacatgaatctgcacatctgtaaatctacacacggtgcctttatttccactgtgcaggttcccacttaaaaattaaattggaaagcaggtttcaaggaagtagaaacaaaatacaatttttttggtaaaaaaaaattactgtttattaaagtacaaccatagaggatggtcttacagcaggcagtatcctgtttgaggaaagcaagaatcagagaaggaacataccccttacaaatgaaaaattccactcaaaatagggactatctatcttaatactaaggaaccaacaatcttcctgtttaaaaaaccacatggcacagagattctgaactaaagtgctgcactcaaatgatgggaagtccggccccagtacacaggggcttgactttttcaacttcgtttcctttgttggagtcaaaaagaaccacttgtggttctaaaaggtgtgaaggtgatttaagggcccaggtcagccactgtttgtttacaaaatcaggtaactaactgcatacactttttctctttccatgacatcaagactttgctaaagacatgaagccacgggtgccagaagctactgcgatgccccgggagttagccccctggtaatagctgtaaacttccaatttctagccatacgctcagctcatccatgcctcagaagtgcatctggagagaacaggtttctaagcataaaagatgaaagagcagttggactttttaaaaattcagcaaagtggttccctctcttagggacagtcaaaaccaagtcacttaggtagtaccaaaataaataaggaaaagcttagctttagaaacagtgcaacactggtctgctgttccagtggtaagctatgtcccaggaatcagtttaaaagcacgacagtggatgctgggtccatatcacacacattgctgtgaacaggaaactcctgtgaccacaacatgaggccactggagacgcatatgagtaagggcactgacggactcatgatttcttcttaccagatgctttcctgttctttaagagtttaaaatcatcagaaaggaaaaacaaactctatattgttcagcatgcaatacataccacgctagggctggctcaattgaaagtgggcaaaagcttacaaatactaaaaagaagtgctgccgcgcagtgtggaggccactgtttggaaataaatcttcctaacactacaaaaaaaaaaaaaaaa

SEQ ID NO: 49 - DNA, 357 bp, Homo sapiens
  modified_base (6)..(6): a, c, t or g
  modified_base (179)..(179): a, c, t or g
  modified_base (340)..(340): a, c, t or g
ttttcngtacatatatctttattttcatacttaaaaagaatcacatactcattccaacagctttaccaggcttcgcaacccaataagttacacactcactcaggtactaggaaggttattgcacagctccttaactgatcggggtcagggcagagtggtcactttccccacagccaggntctggatttgcctcctgtgaagacaccatgcctagcacaggctgacggggcggctgcagtcgaaccttgcctccagattattgaaccagtataagtaggcacaattctcgtgggctactttcacttcagagtgtcatgtttatttgatgtgggagcttttntgaatgggggagggtta

SEQ ID NO: 50 - DNA, 332 bp, Homo sapiens
  modified_base (64)..(64): a, c, t or g
  modified_base (294)..(294): a, c, t or g
  modified_base (312)..(312): a, c, t or g
  modified_base (328)..(328): a, c, t or g
ggcacgagggctacagctccagttggaggtccaaaacgtgttctcgtgactcagcaatttcctngtcagaatccattacctgtaaatagtggccaggctcagcgggtcttgtgtccttcaaattcttcccagcgcgttcctttgcaagcacaaaagcttgtctccagtcacaagccggttcagaatcagaaggcagaagcaattgcagggcaaccagtgttaccttcatcctgtctccagggccactggaattaacaccccaaaaggaggcaaggcaggccccttgccatcggnattctggggagggaccanttttcttgttgggcancctg

SEQ ID NO: 51 - DNA, 2554 bp, Homo sapiens
acaaggcagcctcgctcgagcgcaggccaatcggctttctagctagagggtttaactcctatttaaaaagaagaacctttgaattctaacggctgagctcttggaagacttgggtccttgggtcgcaggtgggagccgacgggtgggtagaccgtgggggatatctcagtggcggacgaggacggcggggacaaggggcggctggtcggagtggcggagcgtcaagtcccctgtcggttcctccgtccctgagtgtccttggcgctgccttgtgcccgcccagcgcctttgcatccgctcctgggcaccgaggcgccctgtaggatactgcttgttacttattacagctagagggtctcactccattgcccaggccagagtgcggggatatttgataagaaacttcagtgaaggccgggcgcggtggctcatgcccgtaatcccagcattttcggaggccgaggctggagtgcaatggtgtgatctcagctcactgcaacctctgcttcctgggtttaagtgattctcctgcctcagcctcccgagtagctgggattacaggcatcatggaccgatctaaagaaaactgcatttcaggacctgttaaggctacagctccagttggaggtccaaaacgtgttctcgtgactcagcaatttccttgtcagaatccattacctgtaaatagtggccaggctcagcgggtcttgtgtccttcaaattcttcccagcgcattcctttgcaagcacaaaagcttgtctccagtcacaagccggttcagaatcagaagcagaagcaattgcaggcaaccagtgtacctcatcctgtctccaggccactgaataacacccaaaagagcaagcagcccctgccatcggcacctgaaaataatcctgaggaggaactggcatcaaaacagaaaaatgaagaatcaaaaaagaggcagtgggctttggaagactttgaaattggtcgccctctgggtaaaggaaagtttggtaatgtttatttggcaagagaaaagcaaagcaagtttattctggctcttaaagtgttatttaaagctcagctggagaaagccggagtggagcatcagctcagaagagaagtagaaatacagtcccaccttcggcatcctaatattcttagactgtatggttatttccatgatgctaccagagtctacctaattctggaatatgcaccacttggaacagtttatagagaacttcagaaactttcaaagtttgatgagcagagaactgctacttatataacagaattggcaaatgccctgtcttactgtcattcgaagagagttattcatagagacattaagccagagaacttacttcttggatcagctggagagcttaaaattgcagattttgggtggtcagtacatgctccatcttccaggaggaccactctctgtggcaccctggactacctgccccctgaaatgattgaaggtcggatgcatgatgagaaggtggatctctggagccttggagttctttgctatgaatttttagttgggaagcctccttttgaggcaaacacataccaagagacctacaaaagaatatcacgggttgaattcacattccctgactttgtaacagagggagccagggacctcatttcaagactgttgaagcataatcccagccagaggccaatgctcagagaagtacttgaacacccctggatcacagcaaattcatcaaaaccatcaaattgccaaaacaaagaatcagctagcaaacagtcttaggaatcgtgcagggggagaaatccttgagccagggctgccatataacctgacaggaacatgctactgaagtttattttaccattgactgctgccctcaatctagaacgctacacaagaaatatttgttttactcagcaggtgtgccttaacctccctattcagaaagctccacatcaataaacatgacactctgaagtgaaagtagccacgagaattgtgctacttatactggttcataatctggaggcaaggttcgactgcagccgccccgtcagcctgtgctaggcatggtgtcttcacaggaggcaaatccagagcctggctgtggggaaagtgaccactctgccctgaccccgatcagttaaggagctgtgcaataaccttcctagtacctgagtgagtgtgtaacttattgggttggcgaagcctggtaaagctgttggaatgagtatgtgattctttttaagtatgaaaataaagatatatgtacagacttgtattttttctctggtggcattcctttaggaatgctgtgtgtctgtccggcaccccggtaggcctgattgggtttctagtcctccttaaccacttatctcccatatgagagtgtgaaaaataggaacacgtgctctacctccatttagggatttgcttgggatacagaagaggccatgtgtctcagagctgttaagggcttatttttttaaaacattggagtcatagcatgtgtgtaaactttaaatatgcaaataaataagtatctatgtctaaaaaaa

SEQ ID NO: 52 - DNA, 441 bp, Homo sapiens
  modified_base (11)..(11): a, c, t or g
  modified_base (320)..(320): a, c, t or g
atttatttaantttttttattaacgcttgaagaaaaataatgcaatgtgacaatgtacaggtcctgttgcctaaatccgtagtagaaacagatattatcacttagcaagctcacgtggtgccaattctgagatcagacggggttgttcctccttaggaagtggccactggaagcattgtttttccatgctatttccgtgaagccttttgcttggttcgagtttaaatttctccctttgtgtgagtatgactatagttctggcctgggtgttttctatttatttagttttaggatgtcagcattttactatacttgggccnctcacttcaggaataacagggctatttattggatacaaagggagagggtgttcagatccatcttgttaaggatgcagagctccaaaataaacactaaatctttatttggggggatccccca

SEQ ID NO: 53 - DNA, 451 bp, Homo sapiens
  modified_base (410)..(410): a, c, t or g
  modified_base (415)..(415): a, c, t or g
  modified_base (428)..(428): a, c, t or g
  modified_base (447)..(447): a, c, t or g
cagctgttcatttgtccgccagctcctggactggatgtgtgaaaggcatcacatttccattttcctccgtgtaaatgttttatgtgttcgcctactgatcccattcgttgcttctattgtaaatatttgtcatttgtatttattatctctgtgttttccccctaaggcataaaatggtttactgtgttcatttgaacccatttactgatctctgttgtatatttttcatgccactgctttgttttctcctcagaagtcgggtaggataggcatttctatcccatccctcacgttattgggaaggcatgcaacagtatttattgctcaggggtcttctggctttaaaactgagggaaggtccacattcctggcaagcattggattggaggacatttggcacaatctaaaangttanggcaaagtagggncattaaaaatacacccccnattt

SEQ ID NO: 54 - DNA, 5361 bp, Homo sapiens
tttctccttccctccacgggccgggtgagaaagtagccgggggctatcccgacccggcggttcttggggagggggccgaacaagaaaagggaggagatggagataacttccccggatttagcttttttgtctttgtttttgttctcaccacttccatcggatgactggagagtaaaagggaacccggagcggggtggcgagcagcgctttgagaaaatgcaggagtgtgtttggagacgcgtaaagttgcctttcaagctctggcctccgggcacgcgatgctccgcggcgggctgactcagggctgccttgggcctccctgccaccctcctggaaatgatgcaagtcctgactgtcacctggatccctgcagcccagcctggaatgcgtctggattaggggaaagacgagaaacgacactccaggtgttgcacggcccaccaaagcgggaagatagggcagttgctcagaccaaatactgtatctagtgcttctgctcctatcttcaatcgtggggttctttttaatgcaaagtgtcacaaggccaggaattcccatgtgtgctcagttggcccacagcatcattgtgcctaggaaactgcttcaatttatcaagtcctctgggctgggaatctcactgaattccaaacggcggaaagaggaaactttcccaacccgatgtgggtgtgacgcgagccaggggccccagggacactgtcccagagcacaccgtccccctttaacagcaactggagcttggattcgctcttatattgtacagtcctttcgaccattgccctggagcacccgcacacgcgcacgcatctccggccgcgctcacacacactcatacacacgcacgcaaacgcgtggccgccgccaggtcggcaactttgtccggcgctcccagcggcgctcggcttcctcctgtagtagttgagcgcaggccccgcctcccggccgtgttgtcaaaagggccggggtctcggattggtccagccgccgggacaacacctgctcgactccttcattcaagtgacaccagagcttccagggatatttgaggcaccatccctgccattgccgggcactcgcggcgctgctaacggcctggtcacatgctctccggagagctacgggagggcgctgggtaacctctatccgagccgcggccgcgaggaggagggaaaaggcgagcaaaaaggaagagtgggaggaggaggggaagcggcgaaggaggaagaggaggaggaggaagaggggagcacaaaggatccaggtctcccgacgggaggttaataccaagaaccatgtgtgccgagcggctgggccagttcatgaccctggctttggtgttggccacctttgacccggcgcgggggaccgacgccaccaacccacccgagggtccccaagacaggagctcccagcagaaaggccgcctgtccctgcagaatacagcggagatccagcactgtttggtcaacgctggcgatgtggggtgtggcgtgtttgaatgtttcgagaacaactcttgtgagattcggggcttacatgggatttgcatgacttttctgcacaacgctggaaaatttgatgcccagggcaagtcattcatcaaagacgccttgaaatgtaaggcccacgctctgcggcacaggttcggctgcataagccggaagtgcccggccatcagggaaatggtgtcccagttgcagcgggaatgctacctcaagcacgacctgtgcgcggctgcccaggagaacacccgggtgatagtggagatgatccatttcaaggacttgctgctgcacgaaccctacgtggacctcgtgaacttgctgctgacctgtggggaggaggtgaaggaggccatcacccacagcgtgcaggttcagtgtgagcagaactggggaagcctgtgctccatcttgagcttctgcacctcggccatccagaagcctcccacggcgccccccgagcgccagccccaggtggacagaaccaagctctccagggcccaccacggggaagcaggacatcacctcccagagcccagcagtagggagactggccgaggtgccaagggtgagcgaggtagcaagagccacccaaacgcccatgcccgaggcagagtcgggggccttggggctcagggaccttccggaagcagcgagtgggaagacgaacagtctgagtattctgatatccggaggtgaaatgaaaggcctggccacgaaatctttcctccacgccgtccattttcttatctatggacattccaaaacatttaccattagagaggggggatgtcacacgcaggattctgtggggactgtggacttcatcgaggtgtgtgttcgcggaacggacaggtgagatggagacccctggggccgtggggtctcaggggtgcctggtgaattctgcacttacacgtactcaagggagcgcgcccgcgttatcctcgtacctttgtcttctttccatctgtggagtcagtgggtgtcggccgctctgttgtgggggaggtgaaccagggaggggcagggcaaggcagggcccccagagctgggccacacagtgggtgctgggcctcgccccgaagcttctggtgcagcagcctctggtgctgtctccgcggaagtcagggcggctggattccaggacaggagtgaatgtaaaaataaatatcgcttagaatgcaggagaagggtggagaggaggcaggggccgagggggtgcttggtgccaaactgaaattcagtttcttgtgtggggccttgcggttcagagctcttggcgagggtggagggaggagtgtcatttctatgtgtaatttctgagccattgtactgtctgggctgggggggacactgtccaagggagtggcccctatgagtttatattttaaccactgcttcaaatctcgatttcactttttttatttatccagttatatctacatatctgtcatctaaataaatggctttcaaacaaagcaactgggtcattaaaaccagctcaaagggggtttaaaaaaaaaaaaccagcccatcctttgaggctgatttttcttttttttaagttctattttaaaagctatcaaacagcgacatagccatacatctgactgcctgacatggactcctgcccacttgggggaaaccttatacccagaggaaaatacacacctggggagtacatttgacaaatttcccttaggatttcgttatctcaccttgaccctcagccaagattggtaaagctgcgtcctggcgattccaggagacccagctggaaacctggcttctccatgtgaggggatgggaaaggaaagaagagaatgaagactacttagtaattcccatcaggaaatgctgaccttttacataaaatcaaggagactgctgaaaatctctaagggacaggattttccagatcctaattggaaatttagcaataaggagaggagtccaaggggacaaataaaggcagagagaagagacagaactaaaaatacgaggaaaggagagtgaggattttcattaaaagtctcagcagtgggtttcttgggttatttaaaacatcacctaaataggccttttcttcctaattggccatcaaattaaagcctatcctttctcaagcaggagctggtattgtagggagtggccgggtattctgggctgggctcttctggagtagggggtcagcaaacattgtctgcaaagggccagatactgaatccagtactttcagtttggcgagccgtgaggtctctgtcgaaactactcaactctgccgtcctagcacaaaagcagccatagacaacacacaaacgagagggcttggctcccttccaggaagatttatttaacaggctcccagctgaatttcactcacaggacacagtttactgatctctgttctagtgagtgggtcaaaaagcatatgcatccttatccgtcaactcatcagctcttcctcaaggcaacctgaggccagacaccaagaaaccaagcgtatctgctctaaaatgacttgttcctggggaatgccttcaaccaaaacacagctagtatttctatgccccaaatccaatcccagtctttcatgatccatgccggcggttgggtggggaggggaatcattggttgggggaagggaggaaaccccacctccagcccccgccaccgggctccctgggcacccagcaagatctggggctgcagagaacagaagagctggtgcacttaatccagctctgcccttggggggaggaggacctgtgtgtcaggctctgccatgggaacgagtgtaaaccgtggctgtctcctgcagtgagccaccgcggcaggcacgttgactgttttactgacatcactcaaaagctaaagcaataacattctcctgcgttgctgagtcagctgttcatttgtccgccagctcctggactggatgtgtgaaaggcatcacatttccattttcctccgtgtaaatgttttatgtgttcgcctactgatcccattcgttgcttctattgtaaatatttgtcatttgtatttattatctctgtgttttccccctaaggcataaaatggtttactgtgttcatttgaacccatttactgatctctgttgtatatttttcatgccactgctttgttttctcctcagaagtcgggtagatagcatttctatcccatccctcacgttattggaagcatgcaacagtatttattgctcagggtcttctgcttaaaactgaggaaggtccacattcctgcaagcattgattgagacatttgcacaatctaaaatgtaagcaaagtagtcattaaaaatacaccctctacttgggctttatactgcatacaaatttactcatgagccttcctttgaggaaggatgtggatctccaaataaagatttagtgtttattttgagctctgcatcttaacaagatgatctgaacacctctcctttgtatcaataaatagccctgttattctgaagtgagaggaccaagtatagtaaaatgctgacatctaaaactaaataaatagaaaacaccaggccagaactatagtcatactcacacaaagggagaaatttaaactcgaaccaagcaaaaggcttcacggaaatagcatggaaaaacaatgcttccagtggccacttcctaaggaggaacaaccccgtctgatctcagaattggcaccacgtgagcttgctaagtgataatatctgtttctactacggatttaggcaacaggacctgtacattgtcacattgcattatttttcttcaagcgttaataaaagttttaaataaatggcaaaaaaaaaaaaaaaaaa

SEQ ID NO: 55 - DNA, 387 bp, Homo sapiens
tttttttttgaatagcttacaatacgcaacttccacacggttgtgacatcccttgataaaccttgttccttttgttcagcagattccatggccttcctaatttccaactggatctgagcttgtttcttatcattcaacatttgcctgtgattattcaaggctcttaactgctcttcactgaaataaccctcaaggtaagctgggtctgctgcattcttcactgcttcataaagctctgcaccatcttgcaaagacgaacttgctgtcttgttagtgcacgtgatggtaaatatggttttgttgtgttttcttcatgttcttcaaattcctcctgaattttagtgaataaggcttctagtctcttttgttgggcctcacatattttgc

SEQ ID NO: 56 - DNA, 10987 bp, Homo sapiens
ggtggcgcgagcttctgaaactaggcggcagaggcggagccgctgtggcactgctgcgcctctgctgcgcctcgggtgtcttttgcggcggtgggtcgccgccgggagaagcgtgaggggacagatttgtgaccggcgcggtttttgtcagcttactccggccaaaaaagaactgcacctctggagcggacttatttaccaagcattggaggaatatcgtaggtaaaaatgcctattggatccaaagagaggccaacattttttgaaatttttaagacacgctgcaacaaagcagatttaggaccaataagtcttaattggtttgaagaactttcttcagaagctccaccctataattctgaacctgcagaagaatctgaacataaaaacaacaattacgaaccaaacctatttaaaactccacaaaggaaaccatcttataatcagctggcttcaactccaataatattcaaagagcaagggctgactctgccgctgtaccaatctcctgtaaaagaattagataaattcaaattagacttaggaaggaatgttcccaatagtagacataaaagtcttcgcacagtgaaaactaaaatggatcaagcagatgatgtttcctgtccacttctaaattcttgtcttagtgaaagtcctgttgttctacaatgtacacatgtaacaccacaaagagataagtcagtggtatgtgggagtttgtttcatacaccaaagtttgtgaagggtcgtcagacaccaaaacatatttctgaaagtctaggagctgaggtggatcctgatatgtcttggtcaagttctttagctacaccacccacccttagttctactgtgctcatagtcagaaatgaagaagcatctgaaactgtatttcctcatgatactactgctaatgtgaaaagctatttttccaatcatgatgaaagtctgaagaaaaatgatagatttatcgcttctgtgacagacagtgaaaacacaaatcaaagagaagctgcaagtcatggatttggaaaaacatcagggaattcatttaaagtaaatagctgcaaagaccacattggaaagtcaatgccaaatgtcctagaagatgaagtatatgaaacagttgtagatacctctgaagaagatagtttttcattatgtttttctaaatgtagaacaaaaaatctacaaaaagtaagaactagcaagactaggaaaaaaattttccatgaagcaaacgctgatgaatgtgaaaaatctaaaaaccaagtgaaagaaaaatactcatttgtatctgaagtggaaccaaatgatactgatccattagattcaaatgtagcacatcagaagccctttgagagtggaagtgacaaaatctccaaggaagttgtaccgtctttggcctgtgaatggtctcaactaaccctttcaggtctaaatggagcccagatggagaaaatacccctattgcatatttcttcatgtgaccaaaatatttcagaaaaagacctattagacacagagaacaaaagaaagaaagattttcttacttcagagaattctttgccacgtatttctagcctaccaaaatcagagaagccattaaatgaggaaacagtggtaaataagagagatgaagagcagcatcttgaatctcatacagactgcattcttgcagtaaagcaggcaatatctggaacttctccagtggcttcttcatttcagggtatcaaaaagtctatattcagaataagagaatcacctaaagagactttcaatgcaagtttttcaggtcatatgactgatccaaactttaaaaaagaaactgaagcctctgaaagtggactggaaatacatactgtttgctcacagaaggaggactccttatgtccaaatttaattgataatggaagctggccagccaccaccacacagaattctgtagctttgaagaatgcaggtttaatatccactttgaaaaagaaaacaaataagtttatttatgctatacatgatgaaacattttataaaggaaaaaaaataccgaaagaccaaaaatcagaactaattaactgttcagcccagtttgaagcaaatgcttttgaagcaccacttacatttgcaaatgctgattcaggtttattgcattcttctgtgaaaagaagctgttcacagaatgattctgaagaaccaactttgtccttaactagctcttttgggacaattctgaggaaatgttctagaaatgaaacatgttctaataatacagtaatctctcaggatcttgattataaagaagcaaaatgtaataaggaaaaactacagttatttattaccccagaagctgattctctgtcatgcctgcaggaaggacagtgtgaaaatgatccaaaaagcaaaaaagtttcagatataaaagaagaggtcttggctgcagcatgtcacccagtacaacattcaaaagtggaatacagtgatactgactttcaatcccagaaaagtcttttatatgatcatgaaaatgccagcactcttattttaactcctacttccaaggatgttctgtcaaacctagtcatgatttctagaggcaaagaatcatacaaaatgtcagacaagctcaaaggtaacaattatgaatctgatgttgaattaaccaaaaatattcccatggaaaagaatcaagatgtatgtgctttaaatgaaaattataaaaacgttgagctgttgccacctgaaaaatacatgagagtagcatcaccttcaagaaaggtacaattcaaccaaaacacaaatctaagagtaatccaaaaaaatcaagaagaaactacttcaatttcaaaaataactgtcaatccagactctgaagaacttttctcagacaatgagaataattttgtcttccaagtagctaatgaaaggaataatcttgctttaggaaatactaaggaacttcatgaaacagacttgacttgtgtaaacgaacccattttcaagaactctaccatggttttatatggagacacaggtgataaacaagcaacccaagtgtcaattaaaaaagatttggtttatgttcttgcagaggagaacaaaaatagtgtaaagcagcatataaaaatgactctaggtcaagatttaaaatcggacatctccttgaatatagataaaataccagaaaaaaataatgattacatgaacaaatgggcaggactcttaggtccaatttcaaatcacagttttggaggtagcttcagaacagcttcaaataaggaaatcaagctctctgaacataacattaagaagagcaaaatgttcttcaaagatattgaagaacaatatcctactagtttagcttgtgttgaaattgtaaataccttggcattagataatcaaaagaaactgagcaagcctcagtcaattaatactgtatctgcacatttacagagtagtgtagttgtttctgattgtaaaaatagtcatataacccctcagatgttattttccaagcaggattttaattcaaaccataatttaacacctagccaaaaggcagaaattacagaactttctactatattagaagaatcaggaagtcagtttgaatttactcagtttagaaaaccaagctacatattgcagaagagtacatttgaagtgcctgaaaaccagatgactatcttaaagaccacttctgaggaatgcagagatgctgatcttcatgtcataatgaatgccccatcgattggtcaggtagacagcagcaagcaatttgaaggtacagttgaaattaaacggaagtttgctggcctgttgaaaaatgactgtaacaaaagtgcttctggttatttaacagatgaaaatgaagtggggtttaggggcttttattctgctcatggcacaaaactgaatgtttctactgaagctctgcaaaaagctgtgaaactgtttagtgatattgagaatattagtgaggaaacttctgcagaggtacatccaataagtttatcttcaagtaaatgtcatgattctgttgtttcaatgtttaagatagaaaatcataatgataaaactgtaagtgaaaaaaataataaatgccaactgatattacaaaataatattgaaatgactactggcacttttgttgaagaaattactgaaaattacaagagaaatactgaaaatgaagataacaaatatactgctgccagtagaaattctcataacttagaatttgatggcagtgattcaagtaaaaatgatactgtttgtattcataaagatgaaacggacttgctatttactgatcagcacaacatatgtcttaaattatctggccagtttatgaaggagggaaacactcagattaaagaagatttgtcagatttaacttttttggaagttgcgaaagctcaagaagcatgtcatggtaatacttcaaataaagaacagttaactgctactaaaacggagcaaaatataaaagattttgagacttctgatacattttttcagactgcaagtgggaaaaatattagtgtcgccaaagagtcatttaataaaattgtaaatttctttgatcagaaaccagaagaattgcataacttttccttaaattctgaattacattctgacataagaaagaacaaaatggacattctaagttatgaggaaacagacatagttaaacacaaaatactgaaagaaagtgtcccagttggtactggaaatcaactagtgaccttccagggacaacccgaacgtgatgaaaagatcaaagaacctactctgttgggttttcatacagctagcgggaaaaaagttaaaattgcaaaggaatctttggacaaagtgaaaaacctttttgatgaaaaagagcaaggtactagtgaaatcaccagttttagccatcaatgggcaaagaccctaaagtacagagaggcctgtaaagaccttgaattagcatgtgagaccattgagatcacagctgccccaaagtgtaaagaaatgcagaattctctcaataatgataaaaaccttgtttctattgagactgtggtgccacctaagctcttaagtgataatttatgtagacaaactgaaaatctcaaaacatcaaaaagtatctttttgaaagttaaagtacatgaaaatgtagaaaaagaaacagcaaaaagtcctgcaacttgttacacaaatcagtccccttattcagtcattgaaaattcagccttagctttttacacaagttgtagtagaaaaacttctgtgagtcagacttcattacttgaagcaaaaaaatggcttagagaaggaatatttgatggtcaaccagaaagaataaatactgcagattatgtaggaaattatttgtatgaaaataattcaaacagtactatagctgaaaatgacaaaaatcatctctccgaaaaacaagatacttatttaagtaacagtagcatgtctaacagctattcctaccattctgatgaggtatataatgattcaggatatctctcaaaaaataaacttgattctggtattgagccagtattgaagaatgttgaagatcaaaaaaacactagtttttccaaagtaatatccaatgtaaaagatgcaaatgcatacccacaaactgtaaatgaagatatttgcgttgaggaacttgtgactagctcttcaccctgcaaaaataaaaatgcagccattaaattgtccatatctaatagtaataattttgaggtagggccacctgcatttaggatagccagtggtaaaatcgtttgtgtttcacatgaaacaattaaaaaagtgaaagacatatttacagacagtttcagtaaagtaattaaggaaaacaacgagaataaatcaaaaatttgccaaacgaaaattatggcaggttgttacgaggcattggatgattcagaggatattcttcataactctctagataatgatgaatgtagcacgcattcacataaggtttttgctgacattcagagtgaagaaattttacaacataaccaaaatatgtctggattggagaaagtttctaaaatatcaccttgtgatgttagtttggaaacttcagatatatgtaaatgtagtatagggaagcttcataagtcagtctcatctgcaaatacttgtgggatttttagcacagcaagtggaaaatctgtccaggtatcagatgcttcattacaaaacgcaagacaagtgttttctgaaatagaagatagtaccaagcaagtcttttccaaagtattgtttaaaagtaacgaacattcagaccagctcacaagagaagaaaatactgctatacgtactccagaacatttaatatcccaaaaaggcttttcatataatgtggtaaattcatctgctttctctggatttagtacagcaagtggaaagcaagtttccattttagaaagttccttacacaaagttaagggagtgttagaggaatttgatttaatcagaactgagcatagtcttcactattcacctacgtctagacaaaatgtatcaaaaatacttcctcgtgttgataagagaaacccagagcactgtgtaaactcagaaatggaaaaaacctgcagtaaagaatttaaattatcaaataacttaaatgttgaaggtggttcttcagaaaataatcactctattaaagtttctccatatctctctcaatttcaacaagacaaacaacagttggtattaggaaccaaagtctcacttgttgagaacattcatgttttgggaaaagaacaggcttcacctaaaaacgtaaaaatggaaattggtaaaactgaaactttttctgatgttcctgtgaaaacaaatatagaagtttgttctacttactccaaagattcagaaaactactttgaaacagaagcagtagaaattgctaaagcttttatggaagatgatgaactgacagattctaaactgccaagtcatgccacacattctctttttacatgtcccgaaaatgaggaaatggttttgtcaaattcaagaattggaaaaagaagaggagagccccttatcttagtgggagaaccctcaatcaaaagaaacttattaaatgaatttgacaggataatagaaaatcaagaaaaatccttaaaggcttcaaaaagcactccagatggcacaataaaagatcgaagattgtttatgcatcatgtttctttagagccgattacctgtgtaccctttcgcacaactaaggaacgtcaagagatacagaatccaaattttaccgcacctggtcaagaatttctgtctaaatctcatttgtatgaacatctgactttggaaaaatcttcaagcaatttagcagtttcaggacatccattttatcaagtttctgctacaagaaatgaaaaaatgagacacttgattactacaggcagaccaaccaaagtctttgttccaccttttaaaactaaatcacattttcacagagttgaacagtgtgttaggaatattaacttggaggaaaacagacaaaagcaaaacattgatggacatggctctgatgatagtaaaaataagattaatgacaatgagattcatcagtttaacaaaaacaactccaatcaagcagcagctgtaactttcacaaagtgtgaagaagaacctttagatttaattacaagtcttcagaatgccagagatatacaggatatgcgaattaagaagaaacaaaggcaacgcgtctttccacagccaggcagtctgtatcttgcaaaaacatccactctgcctcgaatctctctgaaagcagcagtaggaggccaagttccctctgcgtgttctcataaacagctgtatacgtatggcgtttctaaacattgcataaaaattaacagcaaaaatgcagagtcttttcagtttcacactgaagattattttggtaaggaaagtttatggactggaaaaggaatacagttggctgatggtggatggctcataccctccaatgatggaaaggctggaaaagaagaattttatagggctctgtgtgacactccaggtgtggatccaaagcttatttctagaatttgggtttataatcactatagatggatcatatggaaactggcagctatggaatgtgcctttcctaaggaatttgctaatagatgcctaagcccagaaagggtgcttcttcaactaaaatacagatatgatacggaaattgatagaagcagaagatcggctataaaaaagataatggaaagggatgacacagctgcaaaaacacttgttctctgtgtttctgacataatttcattgagcgcaaatatatctgaaacttctagcaataaaactagtagtgcagatacccaaaaagtggccattattgaacttacagatgggtggtatgctgttaaggcccagttagatcctcccctcttagctgtcttaaagaatggcagactgacagttggtcagaagattattcttcatggagcagaactggtgggctctcctgatgcctgtacacctcttgaagccccagaatctcttatgttaaagatttctgctaacagtactcggcctgctcgctggtataccaaacttggattctttcctgaccctagaccttttcctctgcccttatcatcgcttttcagtgatggaggaaatgttggttgtgttgatgtaattattcaaagagcataccctatacagtggatggagaagacatcatctggattatacatatttcgcaatgaaagagaggaagaaaaggaagcagcaaaatatgtggaggcccaacaaaagagactagaagccttattcactaaaattcaggaggaatttgaagaacatgaagaaaacacaacaaaaccatatttaccatcacgtgcactaacaagacagcaagttcgtgctttgcaagatggtgcagagctttatgaagcagtgaagaatgcagcagacccagcttaccttgagggttatttcagtgaagagcagttaagagccttgaataatcacaggcaaatgttgaatgataagaaacaagctcagatccagttggaaattaggaaggccatggaatctgctgaacaaaaggaacaaggtttatcaagggatgtcacaaccgtgtggaagttgcgtattgtaagctattcaaaaaaagaaaaagattcagttatactgagtatttggcgtccatcatcagatttatattctctgttaacagaaggaaagagatacagaatttatcatcttgcaacttcaaaatctaaaagtaaatctgaaagagctaacatacagttagcagcgacaaaaaaaactcagtatcaacaactaccggtttcagatgaaattttatttcagatttaccagccacgggagccccttcacttcagcaaatttttagatccagactttcagccatcttgttctgaggtggacctaataggatttgtcgtttctgttgtgaaaaaaacaggacttgcccctttcgtctatttgtcagacgaatgttacaatttactggcaataaagttttggatagaccttaatgaggacattattaagcctcatatgttaattgctgcaagcaacctccagtggcgaccagaatccaaatcaggccttcttactttatttgctggagatttttctgtgttttctgctagtccaaaagagggccactttcaagagacattcaacaaaatgaaaaatactgttgagaatattgacatactttgcaatgaagcagaaaacaagcttatgcatatactgcatgcaaatgatcccaagtggtccaccccaactaaagactgtacttcagggccgtacactgctcaaatcattcctggtacaggaaacaagcttctgatgtcttctcctaattgtgagatatattatcaaagtcctttatcactttgtatggccaaaaggaagtctgtttccacacctgtctcagcccagatgacttcaaagtcttgtaaaggggagaaagagattgatgaccaaaagaactgcaaaaagagaagagccttggatttcttgagtagactgcctttacctccacctgttagtcccatttgtacatttgtttctccggctgcacagaaggcatttcagccaccaaggagttgtggcaccaaatacgaaacacccataaagaaaaaagaactgaattctcctcagatgactccatttaaaaaattcaatgaaatttctcttttggaaagtaattcaatagctgacgaagaacttgcattgataaatacccaagctcttttgtctggttcaacaggagaaaaacaatttatatctgtcagtgaatccactaggactgctcccaccagttcagaagattatctcagactgaaacgacgttgtactacatctctgatcaaagaacaggagagttcccaggccagtacggaagaatgtgagaaaaataagcaggacacaattacaactaaaaaatatatctaagcatttgcaaaggcgacaataaattattgacgcttaacctttccagtttataagactggaatataatttcaaaccacacattagtacttatgttgcacaatgagaaaagaaattagtttcaaatttacctcagcgtttgtgtatcgggcaaaaatcgttttgcccgattccgtattggtatacttttgcttcagttgcatatcttaaaactaaatgtaatttattaactaatcaagaaaaacatctttggctgagctcggtggctcatgcctgtaatcccaacactttgagaagctgaggtgggaggagtgcttgaggccaggagttcaagaccagcctgggcaacatagggagacccccatctttacgaagaaaaaaaaaaaggggaaaagaaaatcttttaaatctttggatttgatcactacaagtattattttacaatcaacaaaatggtcatccaaactcaaacttgagaaaatatcttgctttcaaattgacacta

SEQ ID NO: 57 - DNA, 204 bp, Homo sapiens
  modified_base (110)..(110): a, c, t or g
  modified_base (112)..(112): a, c, t or g
  modified_base (118)..(118): a, c, t or g
  modified_base (133)..(133): a, c, t or g
  modified_base (162)..(162): a, c, t or g
  modified_base (193)..(193): a, c, t or g
ttttttttattgacatttcaataaaaatttattgaaatttcagtgatgttttaaagagagggggaaaaatacagaaaaccaaagaactcatcaacaactataacacaaantntacctncatgattttgtcttnaaaccatctctcagcacctgacttttganctgtgaatatatctctataggcaggcaccanttcaaaacacc

SEQ ID NO: 58 - DNA, 4814 bp, Homo sapiens
gaattctagaggcggcggagggtggcgaggagctctcgctttctctcgctccctccctctccgactccgtctctctctctctctctctctctcccctccctctctttccctctgttccattttttccccctctaaatcctccctgccctgcgcgcctggacacagatttaggaagcgaattcgctcacgttttaggacaaggaagagagagaggcacgggagaagagcccagcaagatttggattgaaaccgagacaccctccggaggctcggagcagaggaaggaggaggagggcggcgaacggaagccagtttgcaattcaagttttgatagcgctggtagaagggggtttaaatcagatttttttttttttaaaggagagagactttttccgctctctcgctccctgttaaagccgggtctagcacagctgcagacgccaccagcgagaaagagggagaggaagacagatagggggcgggggaagaagaaaaagaaaggtaaaaagtcttctaggagaacctttcacatttgcaacaaaagacctaggggctggagagagattcctgggacgcagggctggagtgtctatttcgagctcagcggcagggctcgggcgcgagtcgagaccctgctcgctcctctcgcttctgaaaccgacgttcaggagcggctttttaaaaacgcaaggcacaaggacggtcacccgcgcgactatgtttgctgatttttcgccttgccctctttaaaagcggcctcccattctccaaaagacacttcccctcctccctttgaagtgcattagttgtgatttctgcctccttttcttttttctttcttttttgttttgctttttccccccttttgaattatgtgctgctgttaaacaacaacaaaaaaacaacaaaacacagcagctgcggacttgtccccggctggagcccagcgccccgcctggagtggatgagcctctccatgagagatccggtcattcctgggacaagcatggcctaccatccgttcctacctcaccgggcgccggacttcgccatgagcgcggtgctgggtcaccagccgccgttcttccccgcgctgacgctgcctcccaacggcgcggcggcgctctcgctgccgggcgccctggccaagccgatcatggatcaattggtgggggcggccgagaccggcatcccgttctcctccctggggccccaggcgcatctgaggcctttgaagaccatggagcccgaagaagaggtggaggacgaccccaaggtgcacctggaggctaaagaactttgggatcagtttcacaagcggggcaccgagatggtcattaccaagtcgggaaggcgaatgtttcctccatttaaagtgagatgttctgggctggataaaaaagccaaatacattttattgatggacattatagctgctgatgactgtcgttataaatttcacaattctcggtggatggtggctggtaaggccgaccccgaaatgccaaagaggatgtacattcacccggacagccccgctactggggaacagtggatgtccaaagtcgtcactttccacaaactgaaactcaccaacaacatttcagacaaacatggatttactttggccttcccaagtgatcacgctacgtggcaggggaattatagttttggtactcagactatattgaactccatgcacaaataccagccccggttccacattgtaagagccaatgacatcttgaaactcccttatagtacatttcggacatacttgttccccgaaactgaattcatcgctgtgactgcataccagaatgataagataacccagttaaaaatagacaacaacccttttgcaaaaggtttccgggacactggaaatggccgaagagaaaaaagaaaacagctcaccctgcagtccatgagggtgtttgatgaaagacacaaaaaggagaatgggacctctgatgagtcctccagtgaacaagcagctttcaactgcttcgcccaggcttcttctccagccgcctccactgtagggacatcgaacctcaaagatttatgtcccagcgagggtgagagcgacgccgaggccgagagcaaagaggagcatggccccgaggcctgcgacgcggccaagatctccaccaccacgtcggaggagccctgccgtgacaagggcagccccgcggtcaaggctcaccttttcgctgctgagcggccccgggacagcgggcggctggacaaagcgtcgcccgactcacgccatagccccgccaccatctcgtccagcactcgcggcctgggcgcggaggagcgcaggagcccggttcgcgagggcacagcgccggccaaggtggaagaggcgcgcgcgctcccgggcaaggaggccttcgcgccgctcacggtgcagacggacgcggccgccgcgcacctggcccagggccccctgcctggcctcggcttcgccccgggcctggcgggccaacagttcttcaacgggcacccgctcttcctgcaccccagccagtttgccatggggggcgccttctccagcatggcggccgctggcatgggtcccctcctggccacggtttctggggcctccaccggtgtctcgggcctggattccacggccatggcctctgccgctgcggcgcagggactgtccggggcgtccgcggccaccctgcccttccacctccagcagcacgtcctggcctctcagggcctggccatgtcccctttcggaagcctgttcccttacccctacacgtacatggccgcagcggcggccgcctcctctgcggcagcctccagctcggtgcaccgccaccccttcctcaatctgaacaccatgcgcccgcggctgcgctacagcccctactccatcccggtgccggtcccggacggcagcagtctgctcaccaccgccctgccctccatggcggcggccgcggggcccctggacggcaaagtcgccgccctggccgccagcccggcctcggtggcagtggactcgggctctgaactcaacagccgctcctccacgctctcctccagctccatgtccttgtcgcccaaactctgcgcggagaaagaggcggccaccagcgaactgcagagcatccagcggttggttagcggcttggaagccaagccggacaggtcccgcagcgcgtccccgtagacccgtcccagacacgtcttttcattccagtccagttcaggctgccgtgcactttgtcggatataaaataaaccacgggcccgccatggcgttagcccttccttttgcagttgcgtctgggaaggggccccggactccctcgagagaatgtgctagagacagcccctgtcttcttggcgtggtttatatgtccgggatctggatcagattctgggggctcagaaacgtcggttgcattgagctactgggggtaggagttccaacatttatgtccagagcaacttccagcaaggctggtctgggtctctgcccaccaggcggggaggtgttcaaagacatctccctcagtgcggatttatatatatatttttccttcactgtgtcaagtggaaacaaaaacaaaatctttcaaaaaaaaaatcgggacaagtgaacacattaacatgattctgtttgtgcagattaaaaactttatagggacttgcattatcggttctcaataaattactgagcagctttgtttggggagggaagtccctaccatccttgtttagtctatattaagaaaatctgtgtctttttaatattcttgtgatgttttcagagccgctgtaggtctcttcttgcatgtccacagtaatgtatttgtggtttttattttgaacgcttgcttttagagagaaaacaatatagccccctacccttttcccaatcctttgccctcaaatcagtgacccaagggagggggggatttaaagggaaggagtgggcaaaacacataaaatgaatttattatatctaagctctgtagcaggattcatgtcgttctttgacagttctttctctttcctgtatatgcaataacaaggttttaaaaaaataataaagaagtgagactattagacaaagtatttatgtaattatttgataactcttgtaaataggtggaatatgaatgcttggaaaattaaactttaatttattgacattgtacatagctctgtgtaaatagaattgcaactgtcaggttttgtgttcttgttttcctttagttgggtttatttccaggtcacagaattgctgttaacactagaaaacacacttcctgcaccaacaccaataccctttcaaaagagttgtctgcaacatttttgttttcttttttaatgtccaaaagtgggggaaagtgctatttcctattttcaccaaaattggggaaggagtgccactttccagctccacttcaaattccttaaaatataactgagattgctgtggggagggaggagggcagaggctgcggtttgactttttaatttttcttttgttatttgtatttgctagtctctgatttcctcaaaacgaagtggaatttactactgttgtcagtatcggtgttttgaattggtgcctgcctatagagatatattcacagttcaaaagtcaggtgctgagagatggtttaaagacaaattcatgaaggtatattttgtgttatagttgttgatgagttctttggttttctgtatttttccccctctctttaaaacatcactgaaatttcaataaatttttattgaaatgtctaaaaaaaaaaaaaaaaaaaaaaaaaaaaaaa

SEQ ID NO: 59 - DNA, 242 bp, Homo sapiens
  modified_base (151)..(151): a, c, t or g
  modified_base (157)..(157): a, c, t or g
  modified_base (161)..(161): a, c, t or g
  modified_base (166)..(166): a, c, t or g
  modified_base (177)..(177): a, c, t or g
  modified_base (180)..(180): a, c, t or g
  modified_base (183)..(183): a, c, t or g
  modified_base (189)..(189): a, c, t or g
  modified_base (195)..(195): a, c, t or g
  modified_base (202)..(202): a, c, t or g
  modified_base (239)..(239): a, c, t or g
attcggcacgatgactggccagggtataaaaagggcccacaagagaccggctctaggatcccaaggcccaactccccgaaccactcagggtcctgtggcagctcacctagtggcaatggctccaggctcccggaacgtccctgatcctggnttttgncctnctctnactgccctggnttnaanaagctngtgccntccaaancgttccgttatccagggtttttgaccacgctatgctncaa

SEQ ID NO: 60 - DNA, 1132 bp, Homo sapiens
gcagggagagagaactggccagggtataaaaagggcccacaagagaccggctctaggatcccaaggcccaactccccgaaccactcagggtcctgtggacagctcacctagtggcaatggctccaggctcccggacgtccctgctcctggcttttgccctgctctgcctgccctggcttcaagaggctggtgccgtccaaaccgttccgttatccaggctttttgaccacgctatgctccaagcccatcgcgcgcaccagctggccattgacacctaccaggagtttgaagaaacctatatcccaaaggaccagaagtattcattcctgcatgactcccagacctccttctgcttctcagactctattccgacaccctccaacatggaggaaacgcaacagaaatccaatctagagctgctccgcatctccctgctgctcatcgagtcgtggctggagcccgtgcggttcctcaggagtatgttcgccaacaacctggtgtatgacacctcggacagcgatgactatcacctcctaaaggacctagaggaaggcatccaaacgctgatgggggtgagggtggcgccaggggtcaccaatcctggaaccccactggcttcgagggctgggggagagaaatactgctgccctctttttagcagtaaggcgctgacccaagagaactcaccttattcttcatttcgcctggtgaatcctccaggcctttctctacaccctgaaggggagggaggaaaatggataaatgagagagggagggaacagtgcccaagcgcttggcctctccttctcttccttcactttgcagaggctggaagacggcagccgccggactgggcagatcctcaagcagacctacagcaagtttgacacaaactcgcacaaccatgacgcactgctcaagaactacgggctgctctactgcttcaggaaggacatggacaaggtcgagacattcctgcgcatggtgcagtgccgctctgtggagggcagctgtggcttctaggtgcccgagtagcatcctgtgacccctccccagtgcctctcctggccctgaaggtgccactccagtgcccaccagccttgtcctaataaaattaagttgtatcatttca

SEQ ID NO: 61 - DNA, 516 bp, Homo sapiens
  modified_base (286)..(286): a, c, t or g
  modified_base (337)..(337): a, c, t or g
  modified_base (384)..(384): a, c, t or g
  modified_base (396)..(396): a, c, t or g
  modified_base (404)..(404): a, c, t or g
  modified_base (470)..(470): a, c, t or g
  modified_base (483)..(483): a, c, t or g
tcttttctcttttttcttttttttattttcttttaatgcatcaaacaactgtggccagtgaaaggaaacaaaactggcagtttgtccatttgaatatcagacctagtttcttcttaatttccacactatttctcccatattccttaaacttcttgggcatccttcatgccttacagctacccaggatgcaataaagtcattgtacagtatttcttacaatataagttatatggcaatgttcaggcatttttttttttcacaggcactaggaggaccctggttaaanggggggatatggaggtcaggaatggggcttattcacaggtgggggggtccnggattcagtggggttggggggacacaggacaccacaggtgagggctncctttggcaagngggggccnaacataatttttggcttttctggcccttccaaaaacatttttccctcggcgtttagggggtttccngggttaccggctncccgggcaaattggcagtccggagggggggttt

SEQ ID NO: 62 - DNA, 249 bp, Homo sapiens
  modified_base (206)..(206): a, c, t or g
  modified_base (214)..(214): a, c, t or g
  modified_base (223)..(223): a, c, t or g
  modified_base (240)..(240): a, c, t or g
gtgaactgtggggcaacctcgaccccactgtggcggcgagatggcacgggacactacctgtgcaacgcctgcgggctctatcacaaaatgaacggacagaaccggcccctcattaagcccaagcgaaggctgtctgcagcagggagagcagggacgtccctgttgcgaacttgttcaagaccaacacaaccacaattttggaaganggattccnattgggganccttttttgcaatttcntttggcttt

SEQ ID NO: 63 - DNA, 3070 bp, Homo sapiens
ggcgccgtcttgatactttcagaaagaatgcattccctgtaaaaaaaaaaaaaaaatactgagagagggagagagagagagaagaagagagagagacggagggagagcgagacagagcgagcaacgcaatctgaccgagcaggtcgtacgccgccgcctcctcctcctctctgctcttcgctacccaggtgacccgaggagggactccgcctccgagcggctgaggaccccggtgcagaggagcctggctcgcagaattgcagagtcgtcgcccctttttacaacctggtcccgttttattctgccgtacccagtttttggatttttgtcttccccttcttctctttgctaaacgacccctccaagataatttttaaaaaaccttctcctttgctcacctttgcttcccagccttcccatccccccaccgaaagcaaatcattcaacgacccccgaccctccgacggcaggagccccccgacctcccaggcggaccgccctccctccccgcgcgcgggttccgggcccggcgagagggcgcgagcacagccgaggccatggaggtgacggcggaccagccgcgctgggtgagccaccaccaccccgccgtgctcaacgggcagcacccggacacgcaccacccgggcctcagccactcctacatggacgcggcgcagtacccgctgccggaggaggtggatgtgctttttaacatcgacggtcaaggcaaccacgtcccgccctactacggaaactcggtcagggccacggtgcagaggtaccctccgacccaccacgggagccaggtgtgccgcccgcctctgcttcatggatccctaccctggctggacggcggcaaagccctgggcagccaccacaccgcctccccctggaatctcagccccttctccaagacgtccatccaccacggctccccggggcccctctccgtctaccccccggcctcgtcctcctccttgtcggggggccacgccagcccgcacctcttcaccttcccgcccaccccgccgaaggacgtctccccggacccatcgctgtccaccccaggctcggccggctcggcccggcaggacgagaaagagtgcctcaagtaccaggtgcccctgcccgacagcatgaagctggagtcgtcccactcccgtggcagcatgaccgccctgggtggagcctcctcgtcgacccaccaccccatcaccacctacccgccctacgtgcccgagtacagctccggactcttcccccccagcagcctgctgggcggctcccccaccggcttcggatgcaagtccaggcccaaggcccggtccagcacagaaggcagggagtgtgtgaactgtggggcaacctcgaccccactgtggcggcgagatggcacgggacactacctgtgcaacgcctgcgggctctatcacaaaatgaacggacagaaccggcccctcattaagcccaagcgaaggctgtctgcagccaggagagcagggacgtcctgtgcgaactgtcagaccaccacaaccacactctggaggaggaatgccaatggggaccctgtctgcaatgcctgtgggctctactacaagcttcacaatattaacagacccctgactatgaagaaggaaggcatccagaccagaaaccgaaaaatgtctagcaaatccaaaaagtgcaaaaaagtgcatgactcactggaggacttccccaagaacagctcgtttaacccggccgccctctccagacacatgtcctccctgagccacatctcgcccttcagccactccagccacatgctgaccacgcccacgccgatgcacccgccatccagcctgtcctttggaccacaccacccctccagcatggtcaccgccatgggttagagccctgctcgatgctcacagggcccccagcgagagtccctgcagtccctttcgacttgcatttttgcaggagcagtatcatgaagcctaaacgcgatggatatatgtttttgaaggcagaaagcaaaattatgtttgccactttgcaaaggagctcactgtggtgtctgtgttccaaccactgaatctggaccccatctgtgaataagccattctgactcatatcccctatttaacagggtctctagtgctgtgaaaaaaaaaatgctgaacattgcatataacttatattgtaagaaatactgtacaatgactttattgcatctgggtagctgtaaggcatgaaggatgccaagaagtttaaggaatatgggagaaatagtgtggaaattaagaagaaactaggtctgatattcaaatggacaaactgccagttttgtttcctttcactggccacagttgtttgatgcattaaaagaaaataaaaaaaagaaaaaagagaaaagaaaaaaaaagaaaaaagttgtaggcgaatcatttgttcaaagctgttggcctctgcaaaggaaataccagttctgggcaatcagtgttaccgttcaccagttgccgttgagggtttcagagagcctttttctaggcctacatgctttgtgaacaagtccctgtaattgttgtttgtatgtataattcaaagcaccaaaataagaaaagatgtagatttatttcatcatattatacagaccgaactgttgtataaatttatttactgctagtcttaagaactgctttctttcgtttgtttgtttcaatattttccttctctctcaatttttggttgaataaactagattacattcagttggcctaaggtggttgtgctcggagggtttcttgtttcttttccattttgtttttggatgatatttattaaatagcttctaagagtccggcggcatctgtcttgtccctattcctgcagcctgtgctgagggtagcagtgtatgagctaccagcgtgcatgtcagcgaccctggcccgacaggccacgtcctgcaatcggcccggctgcctcttcgccctgtcgtgttctgtgttagtgatcactgcctttaatacagtctgttggaataatattataagcataataataaagtgaaaatattttaaaactacaa

SEQ ID NO: 64 - DNA, 268 bp, Homo sapiens
  modified_base (8)..(8): a, c, t or g
  modified_base (10)..(10): a, c, t or g
  modified_base (12)..(13): a, c, t or g
  modified_base (103)..(103): a, c, t or g
  modified_base (114)..(114): a, c, t or g
  modified_base (139)..(139): a, c, t or g
  modified_base (208)..(208): a, c, t or g
  modified_base (217)..(217): a, c, t or g
  modified_base (253)..(253): a, c, t or g
tttgagtnantnnaattctttatttaaaaatctctaactgtaatgtttcataaaaaatatacacgtttctatttacatattccattaattctattagtttganttagattttangtccaattttgaaaagcttgcagantttcttctgaaattacttaaaattactgtatgcataaacttacaaaaacatatgctataccagggcagnggaaaaggnaaaaaagtgaagtgggctacaaggtcccggggggcntcacctggctcacct

SEQ ID NO: 65 - DNA, 254 bp, Homo sapiens
  modified_base (199)..(199): a, c, t or g
  modified_base (245)..(245): a, c, t or g
tatcactcatcacgtcataccagccattttccttagaaaaggaggtggtctgtgaagagccgttgtctccagcaacagttccaggcatgcataccgaagacaatccaggaaaagtggaacatacagaagaactttctagtataacagaagtggtgactactgaagaaatattcctgacgtggtcccaggcagccatctnacttccatagagagagagagtcttcacctttagtagtacccatctnacctgggag

SEQ ID NO: 66 - DNA, 2059 bp, Homo sapiens
ccgcaggcgctcggggttggagccagcgaccgtcggtagcagcatggctctcctctttctcctaccccttgtcatgcagggtgtgagcagggctgagatgggcaccgcggatctggggccgtcctcagtgcctacaccaactaatgttacaattgaatcctataacatgaaccctatcgtatattgggagtaccagatcatgccacaggtccctgtttttaccgtagaggtaaagaactatggtgttaagaattcagaatggattgatgcctgcatcaatatttctcatcattattgtaatatttctgatcatgttggtgatccatcaaattctctttgggtcagagttaaagccagggttggacaaaaagaatctgcctatgcaaagtcagaagaatttgctgtatgccgagatggaaaaattggaccacctaaactggatatcagaaaggaggagaagcaaatcatgattgacatatttcacccttcagtttttgtaaatggagacgagcaggaagtcgattatgatcccgaaactacctgttacattagggtgtacaatgtgtatgtgagaatgaacggaagtgagatccagtataaaatactcacgcagaaggaagatgattgtgacgagattcagtgccagttagcgattccagtatcctcactgaattctcagtactgtgtttcagcagaaggagtcttacatgtgtggggtgttacaactgaaaagtcaaaagaagtttgtattaccattttcaatagcagtataaaaggttctctttggattccagttgttgctgctttactactctttctagtgcttagcctggtattcatctgtttttatattaagaaaattaatccattgaaggaaaaaagcataatattacccaagtccttgatctctgtggtaagaagtgctactttagagacaaaacctgaatcaaaatatgtatcactcatcacgtcataccagccattttccttagaaaaggaggtggtctgtgaagagccgttgtctccagcaacagttccaggcatgcataccgaagacaatccaggaaaagtggaacatacagaagaactttctagtataacagaagtggtgactactgaagaaaatattcctgacgtggtcccgggcagccatctgactccaatagagagagagagttcttcacctttaagtagtaaccagtctgaacctggcagcatcgctttaaactcgtatcactccagaaattgttctgagagtgatcactccagaaatggttttgatactgattccagctgtctggaatcacatagctccttatctgactcagaatttcccccaaataataaaggtgaaataaaaacagaaggacaagagctcataaccgtaataaaagcccccacctcctttggttatgataaaccacatgtgctagtggatctacttgtggatgatagcggtaaagagtccttgattggttatagaccaacagaagattccaaagaattttcatgagatcagctaagttgcaccaactttgaagtctgattttcctggacagttttctgctttaatttcatgaaaagattatgatctcagaaattgtatcttagttggtatcaaccaaatggagtgacttagtgtacatgaaagcgtaaagaggatgtgtggcattttcacttttggcttgtaaagtacagacttttttttttttttaaacaaaaaaagcattgtaacttatgaacctttacatccagataggttaccagtaacggaacatatccagtactcctggttcctaggtgagcaggtgatgccccagggacctttgtagccacttcactttttttcttttctctgccttggtatagcatatgtgttttgtaagtttatgcatacagtaattttaagtaatttcagaagaaattctcgaagcttttcaaaattggacttaaaatctaattcaaactaatagaattaatggaatatgtaaatagaaacgtgtatattttttatgaaacattacagttagagatttttaaataaagaattttaaaactc

SEQ ID NO: 67 - DNA, 400 bp, Homo sapiens
tttttttttttttttttgcggacagtaaaccgtttattactgtgtggacacagacaccgtggtgcatgacagacagtttcaacaccatgagcgctggggacggagctgtgcctggacagctctgcggtgtgtggtggcgccacgctgggccggctgtcaccgccagctgagggctaacaggtcacctgggagaaaacctggaaaccgtctaatgaagcaggtgacttaggggcgtctctagaaacccaaagaaatgtaccttaaataagcaaatataaaacacaaaaaagacgagcagacctggtgttccgtgtcaggcagaatctaaaaaaacccaggagttgcacttggtttcctcactgtcatgtgtgatcacaggtcaggacgtttcacagcagcg

SEQ ID NO: 68 - DNA, 1853 bp, Homo sapiens
gagggtctgtggtcctctgatcaacataggctggtgggagtacaggactcgcctcctcagggttccctgtgctgccacttttcagccatggccacaagtgaacagagtatctgccaagcccgggcttccgtgatggtctacgatgacaccagtaagaaatgggtaccaatcaaacctggccagcagggattcagccggatcaacatctaccacaacactgccagcaacaccttcagagtcgttggagtcaagttgcaggatcagcaggttgtgatcaattattcaatcgtgaaagggctgaagtacaatcaggccacgccaaccttccaccagtggcgagatgcccgccaggtctacggcttaaactttgcaagtaaagaagaggcaaccacgttctccaatgcaatgctgtttgccctgaacatcatgaattcccaagaaggaggcccctccagccagcgtcaggtgcagaatggcccctctcctgatgagatggacatccagagaagacaagtgatggagcagcaccagcagcagcgtcaggaatctctagaaagaagaacctcggccacagggcccatcctcccaccaggacatccttcatctgcagccagcgcccccgtctcatgtagtgggcctccaccgccccccccacccccagtcccacctccacccactggggctaccccacctcccccacccccactgccagccggaggagcccaggggtccagccacgacgagagctccatgtcaggactggccgctgccatagctggggccaagctgagaagagtccaacggccagaagacgcatctggaggctccagtcccagtgggacctcaaagtccgatgccaaccgggcaagcagcgggggtggcggaggaggcctcatggaggaaatgaacaaactgctggccaagaggagaaaagcagcctcccagtcagacaagccagccgagaagaaggaagatgaaagccaaatggaagatcctagtacctccccctctccggggacccgagcagccagccagccacctaactcctcagaggctggccggaagccctgggagcggagcaactcggtggagaagcctgtgtcctcgattctgtccagaaccccgtctgtggcaaagagccccgaagctaagagcccccttcagtcgcagcctcactctaggatgaagcctgctgggagcgtgaatgacatggccctggatgccttcgacttggaccggatgaagcaggagatcctagaggaggtggtgagagagctccacaaggtgaaggaggagatcatcgacgccatcaggcaggagctgagtgggatcagcaccacgtaaggggccggcctcgctgcgctgattcgtcgagcccatccggcgacagaggacagccagaagcccagccagccccagactccagtgcaccagagcacgcacaggagcctgggcgcgctgctgtgaaacgtcctgacctgtgatcacacatgacagtgaggaaaccaagtgcaactcctgggtttttttagattctgcctgacacggaacaccaggtctgctcgtcttttttgtgttttatatttgcttatttaaggtacatttctttgggtttctagagacgcccctaagtcacctgcttcattagacggtttccaggttttctcccaggtgacgctgttagcgcctcagctggcggtgacagccggcccagcgtggcgccaccacacaccgcagagctgtccaggcacagctccgtccccagcgctcatggtgttgaaactgtctgtcatgcaccacggtgtctgtgtccacacagtaataaacggtttactgtccgcaaaaaaaaaaaa

SEQ ID NO: 69 - DNA, 337 bp, Homo sapiens
  modified_base (177)..(177): a, c, t or g
  modified_base (334)..(334): a, c, t or g
tgaattatttcatttcatttatttcacttgggataggattgaaagtcttgatgatgaggccatagcacagtcagaccatctgcttttccagttctgtgtttgcaccgtctgtgcatccatattccccccaaaaccaagaaggccagtgaaagtggggccagcacaatgccccagggnggaacgtgggaggaggcttccttgactgtgggtgcgtaggtgtctgaaaactcagggtattatgggacaacacatttaaaatccatgtgcaaatcctctcttgtgacagggatcaaaaatcaatgggcacttcaatgtaggtctcattattttctgnata

SEQ ID NO: 70 - DNA, 346 bp, Homo sapiens
  modified_base (311)..(311): a, c, t or g
attcaatggtacaaggattctcttcttttggataaagacaatgagaaatttctaagtgtgagggggaccactcacttactcgtacacgatgtggccctggaagatgctggctattaccgctgtgtcctgacatttgcccatgaaggccagcaatacaacatcactaggagtattgagctacgcattcaagaaaaaaaaagaagagaccattcctgtgatcatttcccccctcaaggaccattttcagcttctctgggggtcaagacttgacaattcccgtgtaagggtgttttttggggaacccggcacancctttaaccaccttgttttgggtgggacgggccca

SEQ ID NO: 71 - DNA, 1484 bp, Homo sapiens
cccgtgaggaggaaaaggtgtgtccgctgccacccagtgtgagcgggtgacaccacccggttaggaaatcccagctcccaagagggtataaatccctgctttactgctgagctcctgctggaggtgaaagtctggcctggcagccttccccaggtgagcagcaacaaggccacgtgctgctgggtctcagtcctccacttcccgtgtcctctggaagttgtcaggagcaatgttgcgcttgtacgtgttggtaatgggagtttctgccttcacccttcagcctgcggcacacacaggggctgccagaagctgccggtttcgtgggaggcattacaagcgggagttcaggctggaaggggagcctgtagccctgaggtgcccccaggtgccctactggttgtgggcctctgtcagcccccgcatcaacctgacatggcataaaaatgactctgctaggacggtcccaggagaagaagagacacggatgtgggcccaggacggtgctctgtggcttctgccagccttgcaggaggactctggcacctacgtctgcactactagaaatgcttcttactgtgacaaaatgtccattgagctcagagtttttgagaatacagatgctttcctgccgttcatctcatacccgcaaattttaaccttgtcaacctctggggtattagtatgccctgacctgagtgaattcacccgtgacaaaactgacgtgaagattcaatggtacaaggattctcttcttttggataaagacaatgagaaatttctaagtgtgagggggaccactcacttactcgtacacgatgtggccctggaagatgctggctattaccgctgtgtcctgacatttgcccatgaaggccagcaatacaacatcactaggagtattgagctacgcatcaagaaaaaaaaagaagagaccattcctgtgatcatttcccccctcaagaccatatcagcttctctggggtcaagactgacaatcccgtgtaaggtgtttctgggaaccggcacacccttaaccaccatgctgtggtggacggccaatgacacccacatagagagcgcctacccgggaggccgcgtgaccgaggggccacgccaggaatattcagaaaataatgagaactacattgaagtgccattgatttttgatcctgtcacaagagaggatttgcacatggattttaaatgtgttgtccataataccctgagttttcagacactacgcaccacagtcaaggaagcctcctccacgttctcctggggcattgtgctggccccactttcactggccttcttggttttggggggaatatggatgcacagacggtgcaaacacagaactggaaaagcagatggtctgactgtgctatggcctcatcatcaagactttcaatcctatcccaagtgaaataaatggaatgaaataattcaaacacaaaaaaaaaaaaaaaaaaaaaaaaaaaaaa

SEQ ID NO: 72 - DNA, 365 bp, Homo sapiens
  modified_base (269)..(269): a, c, t or g
  modified_base (287)..(287): a, c, t or g
  modified_base (330)..(330): a, c, t or g
  modified_base (352)..(352): a, c, t or g
gtacagttaccttttatttatagcgaaaatgggttttttcatttacagagtaacaaagatttttctttaaataaatgtatttcaacgaaaatgaactgacttaaagaaaaaatattaaggaaataatcacaaagatggtacacacggatcattaaaagatacggatgtataggatacatatgtcacaaatgattaaggacttaaaaaatgtaaccctcccaagaagtggggagcctcccaaagtgggggaagggcaaatacaatttccntttggggggggatagggngaccccctttgcagagaggggttaggtggggtttccccccggnacacacaggcaagggtttgggngccccttgtgggg

SEQ ID NO: 73 - DNA, 366 bp, Homo sapiens
  modified_base (1)..(1): a, c, t or g
  modified_base (286)..(286): a, c, t or g
  modified_base (313)..(313): a, c, t or g
  modified_base (337)..(337): a, c, t or g
  modified_base (350)..(350): a, c, t or g
  modified_base (358)..(358): a, c, t or g
  modified_base (364)..(364): a, c, t or g
nattcggcactagggggcacctgaccacacgcccccacaggctctgaccagcagcctatgagggggtttggcaccaagctctgtccaatcaggtaggctgggctgaactagccaatcagatcaactctgtcttgggcgtttgaactcagggagggaggcccttgggagcaggtgcttgtggacaaggctccacaagcgttgagccttggaaaggtagacaagcgttgagccactaagcagaggaccttgggttcccaatacaaaaatacctactgctgagaggggntgctgaccattttggtcaaggatttcngtttgccttatatcccaaataaantcccttttttttnaggttttnttagtntt

SEQ ID NO: 74 - DNA, 4045 bp, Homo sapiens
gcagccagagctcagcagggccctggagagatggccacggtcccagcaccggggaggactggagagcgcgcgctgccaccgccccatgtctcagccagggcttccttcctcggctccaccctgtggatgtaatggcggcccctgctctgtcctggcgtctgcccctcctcatcctcctcctgcccctggctacctcttgggcatctgcagcggtgaatggcacttcccagttcacatgcttctacaactcgagagccaacatctcctgtgtctggagccaagatggggctctgcaggacacttcctgccaagtccatgcctggccggacagacggcggtggaaccaaacctgtgagctgctccccgtgagtcaagcatcctgggcctgcaacctgatcctcggagccccagattctcagaaactgaccacagttgacatcgtcaccctgagggtgctgtgccgtgagggggtgcgatggagggtgatggccatccaggacttcaagccctttgagaaccttcgcctgatggcccccatctccctccaagttgtccacgtggagacccacagatgcaacataagctgggaaatctcccaagcctcccactactttgaaagacacctggagttcgaggcccggacgctgtccccaggccacacctgggaggaggcccccctgctgactctcaagcagaagcaggaatggatctgcctggagacgctcaccccagacacccagtatgagtttcaggtgcgggtcaagcctctgcaaggcgagttcacgacctggagcccctggagccagcccctggccttcaggacaaagcctgcagcccttgggaaggacaccattccgtggctcggccacctcctcgtgggcctcagcggggcttttggcttcatcatcttagtgtacttgctgatcaactgcaggaacaccgggccatggctgaagaaggtcctgaagtgtaacaccccagacccctcgaagttcttttcccagctgagctcagagcatggaggagacgtccagaagtggctctcttcgcccttcccctcatcgtccttcagccctggcggcctggcacctgagatctcgccactagaagtgctggagagggacaaggtgacgcagctgctcctgcagcaggacaaggtgcctgagcccgcatccttaagcagcaaccactcgctgaccagctgcttcaccaaccagggttacttcttcttccacctcccggatgccttggagatagaggcctgccaggtgtactttacttacgacccctactcagaggaagaccctgatgagggtgtggccggggcacccacagggtcttccccccaacccctgcagcctctgtcaggggaggacgacgcctactgcaccttcccctccagggatgacctgctgctcttctcccccagtctcctcggtggccccagccccccaagcactgcccctgggggcagtggggccggtgaagagaggatgcccccttctttgcaagaaagagtccccagagactgggacccccagcccctggggcctcccaccccaggagtcccagacctggtggattttcagccaccccctgagctggtgctgcgagaggctggggaggaggtccctgacgctggccccagggagggagtcagtttcccctggtccaggcctcctgggcagggggagttcagggcccttaatgctcgcctgcccctgaacactgatgcctacttgtccctccaagaactccagggtcaggacccaactcacttggtgtagacagatggccagggtgggaggcaggcagctgcctgctctgcgccgagcctcagaaggaccctgttgagggtcctcagtccactgctgaggacactcagtgtccagttgcagctggacttctccacccggatggcccccacccagtcctgcacacttggtccatccatttccaaacctccactgctgctcccgggtcctgctgcccgagccaggaactgtgtgtgttgcaggggggcagtaactccccaactccctcgttaatcacaggatcccacgaatttaggctcagaagcatcgctcctctccagccctgcagctattcaccaatatcagtcctcgcggctctccagggctccctgccctgacctcttccctgggttttctgccccagcctcctccttccctcccctccccgtccacagggcagcctgagcgtgctttccaaaacccaaatatggccacgctccccctcggttcaaaaccttgcacaggtcccactgccctcagccccacttctcagcctggtacttgtacctccggtgtcgtgtggggacatccccttctgcaatcctccctaccgtcctcctgagccactcagagctccctcacaccccctctgttgcacatgctattccctggggctgctgtgcgctccccctcatctaggtgacaaacttccctgactcttcaagtgccggttttgcttctcctggagggaagcactgcctcccttaatctgccagaaacttctagcgtcagtgctggagggagaagctgtcagggacccagggcgcctggagaaagaggccctgttactattcctttgggatctctgaggcctcagagtgcttggctgctgtatctttaatgctggggcccaagtaagggcacagatccccccacaaagtggatgcctgctgcatcttcccacagtggcttcacagacccacaagagaagctgatggggagtaaaccctggagtccgaggcccaggcagcagccccgcctagtggtgggccctgatgctgccaggcctgggacctcccactgccccctccactggaggggtctcctctgcagctcagggactggcacactggcctccagaagggcagctccacagggcagggcctcattatttttcactgccccagacacagtgcccaacaccccgtcgtataccctggatgaacgaattaattacctggcaccacctcgtctgggctccctgcgcctgacattcacacagagaggcagagtcccgtgcccattaggtctggcatgccccctcctgcaaggggctcaaccccctaccccgacccctccacgtatctttcctaggcagatcacgttgcaatggctcaaacaacattccaccccagcaggacagtgaccccagtcccagctaactctgacctgggagccctcaggcacctgcacttacaggccttgctcacagctgattgggcacctgaccacacgcccccacaggctctgaccagcagcctatgagggggtttggcaccaagctctgtccaatcaggtaggctgggcctgaactagccaatcagatcaactctgtcttgggcgtttgaactcagggagggaggcccttgggagcaggtgcttgtggacaaggctccacaagcgttgagccttggaaaggtagacaagcgttgagccactaagcagaggaccttgggttcccaatacaaaaatacctactgctgagagggctgctgaccatttggtcaggattcctgttgcctttatatccaaaataaactcccctttcttgaggttgtctgagtcttgggtctatgccttgaaaaaagctgaattattggacagtctcacctcctgccatagggtcctgaatgtttcagaccacaaggggctccacacctttgctgtgtgttctggggcaacctactaatcctctctgcaagtcggtctccttatccccccaaatggaaattgtatttgccttctccactttgggaggctcccacttcttgggagggttacattttttaagtcttaatcatttgtgacatatgtatctatacatccgtatcttttaatgatccgtgtgtaccatctttgtgattatttccttaatattttttctttaagtcagttcattttcgttgaaatacatttatttaaagaaaaatctttgttactctgtaaatgaaaaaacccattttcgctataaataaaaggtaactgtacaaaataagtacaatgcaacaaaa

SEQ ID NO: 75 - DNA, 444 bp, Homo sapiens
  modified_base (342)..(342): a, c, t or g
  modified_base (430)..(430): a, c, t or g
tttctatttttttattttcttttaatgcatcaaacaactgtggccagtgaaaggaaacaaaactggcagtttgtccatttgaatatcagacctagtttcttcttaatttccacactatttctcccatattccttaaacttcttggcatccttcatgccttacagctacccagatgcaataaagtcattgtacagtatttcttacaatataagttatatggcaatgttcaggcatttttttttttcacaggcactaggaggaccctgtttaaatgggggatatgaggtcaggaatgggcttattcacaggatggggggtcccggattcaggtgggttggggancacaggacaccacaggtgaggctccctttgccaaaggtggggccaaacataattttggcttttctggcccttcaaaaacatatttccntcgcgttttggggg

SEQ ID NO: 76 - DNA, 396 bp, Homo sapiens
  modified_base (32)..(32): a, c, t or g
  modified_base (331)..(331): a, c, t or g
  modified_base (350)..(350): a, c, t or g
  modified_base (382)..(382): a, c, t or g
  modified_base (387)..(387): a, c, t or g
gcaatggggaccctgtctgcaatgcctgtggntctactacaagcttcacaatattaacagacccctgactatgaagaaggaaggcatccagaccagaaaccgaaaaatgtctagcaaatccaaaaagtgcaaaaagtgcatgactcactggaggacttccccaagaacagctcgtttaacccggccgccctctccagacacatgtcctccctgagccacatctcgcccttcagccactccagccacatgctgaccacggcccacgccgatggcacccgccatccagcctgtcctttgggaccacaccacccctccagctgggtcaccgccntgggtttagagccttgttngatggttcacagggggcccccagcgagagttncctgnagttccttt

SEQ ID NO: 77 - DNA, 311 bp, Homo sapiens
  modified_base (31)..(31): a, c, t or g
  modified_base (98)..(98): a, c, t or g
  modified_base (186)..(186): a, c, t or g
  modified_base (196)..(196): a, c, t or g
  modified_base (220)..(220): a, c, t or g
  modified_base (285)..(285): a, c, t or g
  modified_base (292)..(292): a, c, t or g
  modified_base (296)..(296): a, c, t or g
  modified_base (300)..(300): a, c, t or g
  modified_base (305)..(305): a, c, t or g
aaaagacatcatggccaactggtaggttccnaaggctccttccatccagtcaagacagaagatgcccaggggagtagggaggtgtggggagggaggtntaggggaaggagatatggagagggaggcagagctacagggagcgagccactggaaggataggttcatcccggtgacttcatggctgtnaccacaaatngggtagggaacaggacccaggaancccctcatcccctagcacgtgggtcttctccattaggcacattcagtccactctttcattctttnttcccancctnactnctcanagaaat

SEQ ID NO: 78 - DNA, 498 bp, Homo sapiens
  modified_base (442)..(442): a, c, t or g
  modified_base (497)..(497): a, c, t or g
gggagacactcctataaggagagttcaagcctgtgggagtagaaaaatctcattcccagagtcagaggagaagagacatgtaccttgaccatcgtccttcctctcaagctagccagagggtgggagcctaaggaagcgtggggtagcagatggagtaatggtcacgaggtccagacccactcccaaagctcagacttgccaggctccctttctcttcttccccaggtccttcctttaggtctggttgttgcaccatctgcttggttggctggcagctgagagccctgctgtgggagagcgaagggggtcaaaggaagacttgaagcacagagggctagggaggtggggtacatttctctgagcagtcagggttggaagaaagaatgcaagagtggactgaatgttgcctaatgggagaagacccactgctaggggatgaggngtttctgggtccttttcctaccccattttgtggtcacagccatgaagtcaaccgnt

SEQ ID NO: 79 - DNA, 2246 bp, Homo sapiens
aaagtccgggggagccggtcccgggcagccgctcagccccctgcccctcgccgcccgccgcctgcctgggccgggccgaggatgcggcgcagcgcctcggcggccaggcttgctcccctccggcacgcctgctaacttcccccgctacgtccccgttcgcccgccgggccgccccgtctccccgcgccctccgggtcgggtcctccaggagcgccaggcgctgccgccgtgtgccctccgccgctcgcccgcgcgcccgcgctccccgcctgcgcccagcgccccgcgcccgcgcccagtcctcgggcggtcatgctgcccctctgcctcgtggccgccctgctgctggccgccgggcccgggccgagcctgggcgacgaagccatccactgcccgccctgctccgaggagaagctggcgcgctgccgcccccccgtgggctgcgaggagctggtgcgagagccgggctgcggctgttgcgccacttgcgccctgggcttggggatgccctgcggggtgtacaccccccgttgcggctcgggcctgcgctgctacccgccccgaggggtggagaagcccctgcacacactgatgcacgggcaaggcgtgtgcatggagctggcggagatcgaggccatccaggaaagcctgcagccctctgacaaggacgagggtgaccaccccaacaacagcttcagcccctgtagcgcccatgaccgcaggtgcctgcagaagcacttcgccaaaattcgagaccggagcaccagtgggggcaagatgaaggtcaatggggcgccccgggaggatgcccggcctgtgccccagggctcctgccagagcgagctgcaccgggcgctggagcggctggccgcttcacagagccgcacccacgaggacctctacatcatccccatccccaactgcgaccgcaacggcaacttccaccccaagcagtgtcacccagctctggatgggcagcgtggcaagtgctggtgtgtggaccggaagacgggggtgaagcttccggggggcctggagccaaagggggagctggactgccaccagctggctgacagctttcgagagtgaggcctgccagcaggccagggactcagcgtcccctgctactcctgtgctctggaggctgcagagctgacccagagtggagtctgagtctgagtcctgtctctgcctgcggcccagaagtttccctcaaatgcgcgtgtgcacgtgtgcgtgtgcgtgcgtgtgtgtgtgtttgtgagcatgggtgtgcccttggggtaagccagagcctggggtgttctctttggtgttacacagcccaagaggactgagactggcacttagcccaagaggtctgagccctggtgtgtttccagatcgatcctggattcactcactcactcattccttcactcatccagccacctaaaaacatttactgaccatgtactacgtgccagctctagttttcagccttgggaggttttattctgacttcctctgattttggcatgtggagacactcctataaggagagttcaagcctgtgggagtagaaaaatctcattcccagagtcagaggagaagagacatgtaccttgaccatcgtccttcctctcaagctagccagagggtgggagcctaaggaagcgtggggtagcagatggagtaatggtcacgaggtccagacccactcccaaagctcagacttgccaggctccctttctcttcttccccaggtccttcctttaggtctggttgttgcaccatctgcttggttggctggcagctgagagccctgctgtgggagagcgaagggggtcaaaggaagacttgaagcacagagggctagggaggtggggtacatttctctgagcagtcagggtgggaagaaagaatgcaagagtggactgaatgtgcctaatggagaagacccacgtgctaggggatgaggggcttcctgggtcctgttccctaccccatttgtggtcacagccatgaagtcaccgggatgaacctatccttccagtggctcgctccctgtagctctgcctccctctccatatctccttcccctacacctccctccccacacctccctactcccctgggcatcttctggcttgactggatggaaggagacttaggaacctaccagttggccatgatgtcttttcttctttttcttttttttaacaaaacagaacaaaaccaaaaaatgtccagatgaaaaaaaaaaa

SEQ ID NO: 80 - DNA, 323 bp, Homo sapiens
  modified_base (6)..(6): a, c, t or g
  modified_base (19)..(19): a, c, t or g
  modified_base (223)..(223): a, c, t or g
  modified_base (228)..(228): a, c, t or g
catttnctttcctaaagantatatttgctggataaaggattctgtgttgacagttttgttgctttttaaaagcactttataaatgttgctccatggtttctgatgagaaatctgccatcactgaaatctttggttctcctatatacaaagtgttgttttcttccagttgttttcaaagtattttctttacagttggtttcatcactttgattatgatgtgccngggtntgggtttcctttttggggatttgctgtgccagcagaccggctttaaataggaatgttatggtaaaatgtaatgtgaattattttgttttttttgc

SEQ ID NO: 81 - DNA, 636 bp, Homo sapiens
ctccatctcataaaaaaaaaaaaagtaaagaaaaaaaagaaaatgtctttatttcattttctttcctaaagaatatatttgctggataaaggattctgtgttgacagttttgttgctttttaaaagcactttataaatgttgctccatggtttctgatgagaaatctgccatcactgaaatctttggttctcctatatacaaagtgttgttttcttccagttgttttcaaagtattttctttacagttggtttcatcactttgattatgatgtgcctgggtgtggttttcctttttgggatttgctgtgccagcagaccggctttaaatagaatgttatgtaaatgtatgtgaatatttgttttttgccagatgtttggaagtttttagctattatttcttcagatatttttttcttccaattgttctttctgggctcctaagacatgaatattagactgtttcatattgtcccacagatccccaaaggtcttctcatttttttcacttttttctctgtcattcagactagataatttctgctcatgtatcttcaaatttactgactcttccctcagtcatcttcattgtgttgagaccttccagtaaattttgttattgtaaaaaaaaaaaaaaa

SEQ ID NO: 82 - DNA, 512 bp, Homo sapiens
  modified_base (292)..(292): a, c, t or g
  modified_base (330)..(330): a, c, t or g
  modified_base (356)..(356): a, c, t or g
  modified_base (368)..(368): a, c, t or g
  modified_base (373)..(373): a, c, t or g
  modified_base (379)..(379): a, c, t or g
  modified_base (409)..(409): a, c, t or g
  modified_base (417)..(417): a, c, t or g
  modified_base (436)..(436): a, c, t or g
  modified_base (451)..(451): a, c, t or g
  modified_base (508)..(508): a, c, t or g
gcagaagtctaacagcatttcacaacgacatcagaatgagtttaaaaacgtctcagaatcaccatcaaagcatgagaattctaaagacgtcacagcagctcagaatttagtaagagaatcaggagccccatcacccatcacattcaccagcctcagggaagcagaattctctgacaatcagaggaggctgagccctccttttccactggagcctgcacagaaatctagagtaagcagtccactggccagttttctgcagcaacaaaggagtgcttcatctctggagtgggancctgagccacacctttatcgttcaaagagtttaaaaangcttaatgttcatgggcgtttttttngggaaaaagccntcctnccaaangtcaggggagccccttttttttgaaaggcntttttttngacatggcctggggttcgntttgaccttgggggnttgatttttttgttcaacatggggtacagtcggaggtttcagttttttttctggaantccc

SEQ ID NO: 83 - DNA, 6655 bp, Homo sapiens
gatcaagttcgtgaaactggtcttgtacaggttgaaaaatgccttcctaacaggaggcgccaaggagcttaagtgtaactcacacacagtaaagaaaatgacgaaagttcctccggcgtttgatttcagtttcttaaatgacgaagaggccgggaagatccttcaggtgctggaaaggaatgaggagttacagagggccgagaaggacaggatcagcaaacttcagaagacaaagagggatatcagatggcttcagggagtgactggtgaatggtttgaagaaattcaaagaaaaaagttttgcaatgaaacagatgttagccaaatgttaaaacaaccacttacatacaggctaagtaaggagatggcaaaaaatgatccgatagaattacctacatcaagatctaaaaatgtaactaatcaaaaaaagccgacacctttttcttcccggatgagcttcagatcgtcatttgcttccctgttctcattcaggaaatctggaaaggagacttcaaagcttccatcactgggacagaaaggatgtgatggccatgcaggacctcctatgcctgtgaggggagctgctgtgcaggcaaaaatatacaattcacctctggaaaatcatctagttgacagtacatttgtcccaaagccagcagtcatgagggaggagagtggcatgcctccaccgtgggatgcttcactgctggagaatgagtttttccaagttttagatgacttggatagcaaattggctcaggaacagtctgcaagctcagtgaataccagaacacccctcaactatggatcaagaacacagttcggtcacttttattccagtggtaacagacatggtaatatcacagaaaggcacaaaaaacactataatgaaacttccaatatgtctatctatgacatcctaagaccaggaactcctagggaaggttttaaaaccttttctcctaggacaagcacaatttatgatatgtataggacaagggagcccagagtctttaaagaagattatgtgcaaaagaatacttttggcagtacttcgctgtgttttgacagcaggcaacggtcggccttaccagccacagggcatttcacagcaagaagcttacattttccagccacaactcagagcaagagtgggtttataccaccaaggcaccagcagagtccaaagagaactcctttatcatccatcatatggaacagatcagattcctctagagacagggagaaccaggaagagttcctgagggcaccatcaccaatggaaattgatcccgctgacaagtatgtgtatcccaggggttttcaggagaataagagatatgaatcgtaccattcacagaatgtttaccaacgtgttagtttaaatgctcccatggagaatgcaatgagtcccgacacttttgagaactcagagaacatgccattctaccatcaaagcaacacatttaccagatctttcttcagcaatacctttggacgaagcggagaacagaggagatttggacaaggtcctttttggggccaagagaaaggacattctttctggtctgactttcatcgaagcaggaaatcattcagttcttctgacagagactttgaaatgatttccatggaagcaaatagtgtatcagccattcatggccataatgtttcttctgaacactgggaatcattttcttctggttatggaacagatgtttccagaggccaagaagagccacatccttggcagtttgattttcagagatccacactggatagcatggtggtatcacatggtaatgagacccagttgactcctcattttggcacaccaaatgtttgctccatgactggttcaagctatcacgtcaaatctagtgagttggtaagtcaacaggacagttctcctgtagaagtacatataaacaaagaagcttcctcatttggaattgctcagactctagcatcctcattcaaaacttccttttcccagatttctgatgacagaaggaatcctcagagtcccaacttgcagaatcccacagtcactttgcagaaaatttttccaaataagcctgcctctcatccaatgagaagccatacagaagtcactgtgaccaacagcaattcagttgactctctgcctcttgccaaaagccagcccaatatcttggtcacagaagtaaataatgagaaagacttaaatgaatctatttcagaagaagacaaacagctaagcaagatggaccagacaaacaaggcaggtgaaataccccaacctgtttcacagacagggatctcaaactctttacctgattttcaaaatcccttatcccaggactcagccaagagcaacgggtttggttttaatgcatctaccataataagttcaaaaaagtcacccagagtcttttccaggaaagatacctccaaaatgtatataccgcacacagataaatccaatgacattaaacaagataagaggtttactgaaaacagaaaacttggctcaacagcttcccttcctttcattcaggaacacagaacaccaccatctttccccaggacagaccaaggttgtcaccaggaattaactgtaaataatgaagatatttcaagaattattacaaataaccactggagctctgcactgactgatactcaaaatgcacaatactcaaaatgcaagttaactcctggccacaagacctcgtgtgattctttagatctgtcatcagctgcactaccagattcctcaccatcaaagaattcttcccttgatgctcctgtggttccatctactacagtgttctccaggagaagtccttcagacaaagatccatcgctaggagaaagagaagaaaaagacaatgctgggaagaaccaaaagaatcagtttattgtaagccactcagaaaaccaagagagaaatgatagtcctgtgcctacacatgatgaagtggttgatgtcaaatgccattcacactctccttttaggaatgaaagaggaaaaggaaaaataaggcatcatatatcctgtattgaaaagttaagcaaaacagaaagtatatcagtacccaccagtgatcacaggagcctcattgaagcaaatcaaagcaattccaaagtttctgaacttgacacaatttattgtaccttgccaagaaaatcaagcagttttctcatacatggcaggcagtcaggaagtaaaataatggctgcttcattgaggaatgggccacctcccttccaaatcaaaaataatgtggaagatgcaatggggaactatatgttaaacaaatttagtcccagttctcctgagtcagcgaatgaatgttccaaagtcctttcagactcagccctggaagcacctgaagccacagagagaatgacaaatgtaaaaagcagtggatctacttccgttagaaaaggaccacttccattcctcatcaacagggctatgtcatgtccctcaggggagccacatgcctcaactggaagagaaggaagaaaaaagccattgacctcaggcatggatgcttctgagctaacaccaagggcttgggagagaatcattagccctgtggaaagtgactcatctgttagagattgttctttaaccaaaagacaacaccaaaaggaaaacttccaagaatacactgagaaagagggtaaaatggctgcctccaggagaagtgtatttgctctttcaaatgaagaccctttacctttttgctcagacttgtcaggaaaagaacgtgggaaaacattacataaagttaagacgactagtacgttttctgtttctggtgatgaagataatgtaaaatgtctggaggtggtctcaatatattacactctaccgaggaaacccagcaaaaaattctgtaacctccttcaacagtatacacaaaatactaatttacttatagaatcacctcaagtggagactgaaacatttcctaacgctttagaaaaagacaaacagaattattctacacgagagcagtcaggaacaccttcatgtgaaaatctaaagatgtccgtcaactctgatcagacgctcaccactgaaaatatgactgccttccgattatcaaatagggggcccctagctcctacattacaggaaatggcttctgttgaggcagctgtttctcttcctgaagaggaatctaaagctagagagattttttcagataatttagctaaaacacctctaggtgattcagaaaacaagaaggaaagaggcaaaaagttgcaaagtgaaaccctgcatacttcattgatgcttcagagaaaaaatgtatccgaagaaaaatctgaaaattgtcaacaatccattaattcaagtaacagtggtccctctagtcttccagctctttcagaagttaatattggaaattcccaaactagaagaagttcttgggagtgtacagggagtggtagagccattccatttactggaagtggcaagtgtccccagaaagatcacacatccacagctgtaggtgatggctccagtggatcacagcctagggaaggcagaggggacattggaaccaactgccaaaaaatgactaataaaacactttctcactcagagagtcaagtctttgcccttactccagcattgcataaactacagcttggtgaggagactcagtcagatgaaccaaacttagagagtctgcagtctgaaccaagagaattacctcaaagaagtcaggaggcaaatatgacagagagcaggaaggctgaagatgaaatgcagaagtcagcttgggatcaaccttcacttcctgaaggaaacaaaaataaaaccaacttggatgacctagtaaagggggaaaatagatcttcagttaaacacagattggcagccatgtctaaagccagcagaaaattcccagctaaagatgtaagccccagaagacatgtagctactatcttcccccaaagtggaagcagatctggctttgaccatttatctcttggcacagtggagtgcaacccactgttccctgagcctactccaaaatctgcagagtccattggcgaaagcaggttgagtgagaacagaaagcatgtgaagaaatccgagaaccttctccccattactgtactacccaacagagaaccttctacacacgtcagcaaccagaagtctaacagcatttcacaacgacatcagaatgagtttaaaaacgtctcagaatcaccatcaaagcatgagaattctaaagacgtcacagcagctcagaatttagtaagagaatcaggagccccatcacccatcacattcaccagcctcagggaagcagaattctctgacaatcagaggaggctgagccctccttttccactggagcctgcacagaaatctagagtaagcagtccactggccagttttctgcagcaacaaaggagtgcttcatctctggagtgggaacctgagccacacctctatcgttcaaagagtttaaaaagcattaatgttcatggcgatctactacgaaaaagccatcctccaaaagtcagggagcgccatttttctgaaagcacttctattgacaatgccctgagtcgactgacccttgggaatgaattctctgtcaacaatgggtacagtcgaagattcagatctttttctgaactcccctcctgtgatggaaatgaaagttgggcttatcgcagcgggacaaaaacaggtcccaggtctgcaatatctatatacagacctatcgactatgggatctttgggaaagaacaacagttagctttcttagaaaatgtaaagaggtcacttacacaaggaagattatggaaaccaagttttcttaagaaccctggcttcctaaaagatgatttgaggaaccctcccaacccctcagagtcattaagctcaaattctcccagtagtcaggtgccagaagatggcttatctccaagtgaaccgcttaatatctatgaggatgacccagtggactcagattgtgacacagacacaaccacagatgatgaatactacctggatgaaaatgacaaagagtcagaactgtgaggctttttcaataaaatgctttacttttttcaccaaaagcttataatggaactaaggtgtacatgtgcatgtgcatggaaggataaaagatctagtctgggcagtgtctgctctgaaatgtcccacatctccttttttttcctccacaccctatatagacacttcctgaatgctagaacaatgaattcttgttttgagagagtctctgctattttctatctctgtaaatgttcttagcctgcctttccaccactcccacttaatccctgattcactgtctgatttgggctttctgctttacttccctcctaacatttttcatctttaattgtgatttacaaccctaatatcccaggcacatacaaaacttatgaattacccagcacaactgtgaaactctgtattgcttcttccggtccacaccctatactcatgacattaaataaaaggtagggatgataacagtggggtaaatattatcatcctgtttgactcatgaacatttaggaagtttaaggtggtgatcttctctttcaaacaaagataaaggaatttattttttaacctgagaaactgattgcaaaaagg

SEQ ID NO: 84 - DNA, 382 bp, Homo sapiens
  modified_base (9)..(9): a, c, t or g
  modified_base (19)..(19): a, c, t or g
  modified_base (27)..(27): a, c, t or g
  modified_base (75)..(75): a, c, t or g
  modified_base (145)..(145): a, c, t or g
  modified_base (343)..(343): a, c, t or g
  modified_base (353)..(353): a, c, t or g
gacattttnatattttgtnctgttttnttaaaaaaaagaaaaagaagaaaagacatcatggccaactggtaggtncctaagtctccttccatccagtcaagccagaagatgcccaggggagtagggaggtgtggggagggaggtntaggggaaggagatatggagagggaggcagagctacagggagcgagccactggaaggataggttcatcccggtgacttcatggctgtgaccacaaatggggtagggaacaggacccaggaagcccctcatcccctagcacgtgggtcttctccattagggcacattcagtccactctttgcattcttttctttcccanccctgacttnctcagaggaattttacccccacttcctta

SEQ ID NO: 85 - DNA, 508 bp, Homo sapiens
  modified_base (146)..(146): a, c, t or g
  modified_base (399)..(399): a, c, t or g
  modified_base (410)..(410): a, c, t or g
  modified_base (426)..(426): a, c, t or g
  modified_base (476)..(476): a, c, t or g
  modified_base (483)..(483): a, c, t or g
  modified_base (497)..(497): a, c, t or g
ctgacttcctctgattttggcatgtggagacactcctataaggagagttcaagcctgtgggagtagaaaaatctcattcccagagtcagaggagaagagacatgtaccttgaccatcgtccttcctctcaagctatccagagggtnggagcctaaggaagcgtggggtagcagatagagtaatggtcacgaggtccagacccactcccaaagctcagacttgccaggctccctttctcttcttccccaggtccttcctttaggtctggttgttgcaccatctgcttggttggctggcagctgagagccctgctgtggggagagcgaagggggtcaaaggaagacttgaagcacagagggttagggaggttgggtacattttttttgagcagtcagggtnggaagaaagantgcaagaattggattnaatgtgcctaatttggagaagacccacgtgttaggggatgaagggtttcncggttcnctttccttaccccntttttgttaaa

SEQ ID NO: 86 - DNA, 441 bp, Homo sapiens
  modified_base (4)..(4): a, c, t or g
  modified_base (15)..(15): a, c, t or g
  modified_base (242)..(242): a, c, t or g
  modified_base (341)..(341): a, c, t or g
  modified_base (371)..(371): a, c, t or g
  modified_base (413)..(413): a, c, t or g
  modified_base (420)..(420): a, c, t or g
  modified_base (430)..(430): a, c, t or g
ttangaaataaagangtcttgctatgttgccaggtggaactcaaacttctgggctcacgcggtcttgctgccttggcctcctaactcctgcgctcaggtgatcttcctgcttgggccccctaagtaagctgggattctaggtgtgagccactgtgcccagctctgactgtaacttttgccctagataataacctgtatactgcagtgctgtcataaggatgcatggtactaagaggaaggtntcgaatggcaggcacttagtcaggccatataattaggcaccattattactgctttgggaaggagtaggtataaggcaggccgattccagttaggtaccngagaaagggtgggtgaacgttgctactttnaggcgaactggggagtatcccgggggggaacatggggccctntgggggncttgaagctnggggaaaggcc

SEQ ID NO: 87 - DNA, 461 bp, Homo sapiens
  modified_base (121)..(121): a, c, t or g
  modified_base (281)..(281): a, c, t or g
  modified_base (369)..(369): a, c, t or g
  modified_base (406)..(406): a, c, t or g
  modified_base (440)..(440): a, c, t or g
attcggaacgaggccgtggcgcctggtgcacataggcgttcatagaacgtgctgagggacctgtcactgcacttgtctcttctcaacactggggccagcagctcctggggccctgggcggnggctttcccgtcagcagtgagcccctctgtaagattcgctgaggttgcctgggcaacataggccgggtcccaaagcatgttgctgctgtcggagtccaggaaagtcctggtccctgatcagggagcgagcagagcaaggcagtcctggggccctgggcancttcagcgggaccaggactccccggagagctcaccttgcagagtggctggacctgagctgggagtgacagtgcttggtgccgttccgntcctgaatgtttgctcctaacgtggaacttgcaaatncagcccagcctttcagtctgttccgttttttggnttgcggcttttcccaagttga

SEQ ID NO: 88 - DNA, 447 bp, Homo sapiens
cccgagcgccggccgggccatgacccccgctgctctgtcttgcaggctcgtcgccgcggccccccgagcccgaccgccgccgccaccaccaccagcgcccgggcgggcctcgcgcgcctcgggcgcggctccgcagtgagcccaccaagaaggaagcggcctgcagaggtgccgacatggggcttaagatgtcctgcctgaaaggctttcaaatgtgtgtcagcagcagcagcagcagccacgacgaggcccccgtcctgaacgacaagcacctggacgtgcccgacatcatcatcacgccccccacccccacgggcatgatgctgccgagggacttggggagcacagtctggctggatgagacagggtcgtgcccagatgatggagaaatcgacccagaagcctgaggaggtgtcctgggtttggctggctggctcctgctccagc

SEQ ID NO: 89 - DNA, 241 bp, Homo sapiens
  modified_base (30)..(30): a, c, t or g
  modified_base (39)..(39): a, c, t or g
  modified_base (49)..(49): a, c, t or g
  modified_base (75)..(75): a, c, t or g
  modified_base (78)..(79): a, c, t or g
  modified_base (81)..(81): a, c, t or g
  modified_base (89)..(89): a, c, t or g
  modified_base (94)..(94): a, c, t or g
  modified_base (98)..(98): a, c, t or g
  modified_base (141)..(141): a, c, t or g
  modified_base (144)..(144): a, c, t or g
  modified_base (234)..(234): a, c, t or g
tttttttttttggctttaaaaggaaacaanacgtttgcnagaaaaaccncaaaaaataatgattatatacaaaanggnnanctgaatgnggatnctgnactgcagcagaagcaacccagctccggaactctatttgcgctnccncagtatcagggacatcatgccgctgatgaaggtgcaggcgaaggcacccacgccggggtgtaggagtagccgtagctgccttctctgggncacggga

SEQ ID NO: 90 - DNA, 461 bp, Homo sapiens
  modified_base (14)..(14): a, c, t or g
  modified_base (116)..(116): a, c, t or g
  modified_base (119)..(119): a, c, t or g
  modified_base (383)..(383): a, c, t or g
attcggcacagggnggtaggagatgagttttttgcagatgtctggagaatatgtaccaacaacacgaattgcacagtcatcaatgacagctttcaagagtactccacgctgcaggngtnccaggccaccatgatcctctccaccattctctgctgcatcgccttcttcatcttcgtgctccagctcttccgcctgaagcagggagagaggtttgtcctaacctccatcatccagctaatgtcatgtctgtgtgtcatgattgcggcctccatttatacagacaggcgtgaagacattcacgacaaaaacgcgaaattctatcccgtgaccagagaaggcagctacggctaactcctaacatcctgggcgtgggtggccttcgnctgcacctttcatcagcggcatgatgttacctgattattgaggaagcgcaaatagagtttccggagctggggttgctt

SEQ ID NO: 91 - DNA, 1484 bp, Homo sapiens
gaggggccccgccgcctagagggtggagggagggcgcgcagtcccagcccagagcttcaaaacagcccggcggcctcgcctcgcacccccagccagtccgtcgatccagctgccagcgcagccgccagcgccggcacatcccgctctgggctttaaacgtgacccctcgcctcgactcgccctgccctgtgaaaatgttggtgcttcttgctttcatcatcgccttccacatcacctctgcagccttgctgttcattgccaccgtcgacaatgcctggtgggtaggagatgagttttttgcagatgtctggagaatatgtaccaacaacacgaattgcacagtcatcaatgacagctttcaagagtactccacgctgcaggcggtccaggccaccatgatcctctccaccattctctgctgcatcgccttcttcatcttcgtgctccagctcttccgcctgaagcagggagagaggtttgtcctaacctccatcatccagctaatgtcatgtctgtgtgtcatgattgcggcctccatttatacagacaggcgtgaagacattcacgacaaaaacgcgaaattctatcccgtgaccagagaaggcagctacggctactcctacatcctggcgtgggtggccttcgcctgcaccttcatcagcggcatgatgtacctgatactgaggaagcgcaaatagagttccggagctgggttgcttctgctgcagtacagaatccacattcagataaccattttgtatataatcattattttttgaggtttttctagcaaacgtattgtttcctttaaaagccaaaaaaaaaaaaaaaaaaaaaaaaaaaaaaaaaaaaaaaaaaaaaatccaaaagagagaagagtttttgcattcttgagatcagagaatagactatgaaggctggtattcagaactgctgcccactcaaaagtctcaacaagacacaagcaaaaatccagcaatgctcaaatccaaaagcactcggcaggacatttcttaaccatggggctgtgatgggaggagaggagaggctgggaaagccgggtctctggggacgtgcttcctatgggtttcagctggcccaagcccctcccgaatctctctgctagtggtgggtggaagagggtgaggtggggtataggagaagaatgacagcttcctgagaggtttcacccaagttccaagtgagaagcaggtgtagtccctggcattctgtctgtatccaaaccagagcccagccatccctccggtattggggtgggtcagaaaaagtctcacctcaatttgccgacagtgtcacctgcttgccttaggaatggtcatccttaacctgcgtgccagatttagactcgtctttaggcaaaacctacagcgcccccccctcaccccagacctacagaatcagagtcttcaagggatggggccagggaatctgcatttctaatgcgctccctgggcaacgcttca

SEQ ID NO: 92 - DNA, 334 bp, Homo sapiens
  modified_base (12)..(12): a, c, t or g
  modified_base (47)..(47): a, c, t or g
  modified_base (85)..(85): a, c, t or g
  modified_base (172)..(172): a, c, t or g
  modified_base (215)..(215): a, c, t or g
  modified_base (225)..(225): a, c, t or g
  modified_base (274)..(274): a, c, t or g
  modified_base (283)..(283): a, c, t or g
  modified_base (328)..(328): a, c, t or g
actggtgttaantacatttattgtaaactttagacacaaaaataggntctctaggccattcacatgcacattaaaaccaacaggngcaaactacaacaatgcatataattatacaaatgatgccactctgtgatgtttacaggattgctgtccatgcaaggtgatcataggnattatttatgaagccttaagatccagaagtgttgttactaccnaacctctgantaacactgtgaagtaagtgttttgggaaggcagttccatgagttgggcnaacatttcnttaaaggcaaatgactgcttctaaggcttagcccgtacaagaggntttggg

SEQ ID NO: 93 - DNA, 418 bp, Homo sapiens
tggatatttgcctgaagataaagtattgggaacttttgaattcgatgaaacatctttttggaattcaagtcatccaagaggatggaatgatcatgtacatattttagatactgaaacatttacctggagccagcctataactactggtaaagcaccttcacctcgtgctgcccatgcctgtgcaactgtcggaaatagaggcttcgtgtttggaggcagatatcgagatgctagaatgaatgatcttcactatcttaatctggatacatgggagtggaatgaattaattccacaaggcatatgcccagttggtcgatcttggcactcactaacaccagtttcttcagatgcatctttttctctttggaggatttaccactggatgaaacagccacttaagtgatgcctgggacttact

SEQ ID NO: 94 - DNA, 1808 bp, Homo sapiens
tccggagctcggcgggcggcgtcagcggaacgggcggcttccggccgcggcgtaaacaaggccgtggactgcaggaggcggggcagacgggctgcaagagggagccggcccgacgcggaccgcttccctgcagtgccccgagtcccgggcccgcgccgccgccgcccggctccgctcgcggcccctctgtctgcaggcgtgccccggcggcggcggagagccgtcctcggccgaggaggctgggaaacgcgagcgcaggcggcagagaggcctcaacgccgtccctttcgccaccgccttttccttgcctcgcgccgctgtgcatttctctccttttcctttgtttttttggcccctcgcgggtgtgggcattgttggttagcaaaagtgcagcctcaagatggctgatggcaacgaggatctgcgggctgacgacttgcctgggccagccttcgagagctatgagtccatggagcttgcctgccccgctgagcgcagcggccacgtagccgtcagcgacgggcgccacatgttcgtctggggcggctacaagagtaatcaagtcagaggattatatgacttttatctgcctagagaagaactatggatctacaacatggagactggaagatggaaaaaaatcaacactgaaggtgatgttcctccttctatgtcaggaagctgtgctgtgtgtgtagacagggtgctgtacttgtttggaggacaccattcaagaggcaataccaataagttctacatgctggattcaaggtctacagacagagtgttacagtgggaaagaattgattgccaaggaattcctccatcatcaaaggacaaacttggtgtctgggtatataaaaacaagttaatattttttggagggtatggatatttgcctgaagataaagtattgggaacttttgaattcgatgaaacatctttttggaattcaagtcatccaagaggatggaatgatcatgtacatattttagatactgaaacatttacctggagccagcctataactactggtaaagcaccttcacctcgtgctgcccatgcctgtgcaactgtcggaaatagaggcttcgtgtttggaggcagatatcgagatgctagaatgaatgatcttcactatcttaatctggatacatgggagtggaatgaattaattccacaaggcatatgcccagttggtcgatcttggcactcactaacaccagtttcttcagatcatctttttctctttggaggatttaccactgataaacagccactaagtgatgcctggacttactgcatcagtaaaaatgaatggatacaatttaatcatccatataccgaaaaaccaaggttatggcacacagcttgtgccagcgatgaaggagaagtaattgtttttggtggatgtgccaacaacttgcttgtccatcacagagctgcacacagtaatgaaatactaatattttcagttcaaccaaaatctcttgtacggctaagcttagaagcagtcatttgctttaaagaaatgttagccaactcatggaactgccttccaaaacacttacttcacagtgttaatcagaggtttggtagtaacaacacttctggatcttaaggcttcataaataatgcctatgatcaccttgcatggacagcaatcctgtaaacatcacagagtggcatcatttgtataattatatgcattgttgtagtttgcacctgttggttttaatgtgcatgtgaatggcctagagaacctatttttgtgtctaaagtttacaataaatgtatttaacaccaaa

SEQ ID NO: 95 - DNA, 371 bp, Homo sapiens
  modified_base (8)..(8): a, c, t or g
  modified_base (104)..(104): a, c, t or g
  modified_base (173)..(173): a, c, t or g
  modified_base (209)..(209): a, c, t or g
  modified_base (316)..(316): a, c, t or g
  modified_base (331)..(331): a, c, t or g
  modified_base (341)..(341): a, c, t or g
  modified_base (365)..(365): a, c, t or g
caaatganctttttcaagcaataaataaaaccagacatattgacttctaaaaaacaaaaccaaaccaaaaaaaaatcccctaaactatatacatcctacaggantacaggcattatcaaatgtagaaatggtatcactctgaaagatggggctatttacacaagttacaaganttgcgttgctgatctttaagaagtctcctccttgantaactcataaactctaagggagagagagtactgggtgggggaagcgggggttcaaagagggagacatcctccatctttattgatggggcaagacaggtctcaggggnaaacatcaatatccnaaacaccgtnttggggtcccttaacagggctccncaggtc

SEQ ID NO: 96 - DNA, 417 bp, Homo sapiens
  modified_base (6)..(8): a, c, t or g
  modified_base (10)..(11): a, c, t or g
  modified_base (386)..(386): a, c, t or g
ccaaannnannttgttttattattattcatcatctgagctgttacacaggagcaagcagggtgtggatggggaacattgacagcgggggcttctgggattttcacagggcaagtactgagctcatactagacacgaagctgtttaacagattggggaggcaagtgggtgtgagcagctttcatttttatctgggaacaatatgcagggatgtcttgctgccgtgtcttagaccaagtgttgtctttctcctccaacttgactaaaggatgctgcagggtatcgatgtggggtgggccccagtgggtttgggtgggtgtaaggtgagtatttccccggggggtctcttaactctgaaagagtttcattttgggaagggccgggaccnggcagatcccccggggttacatataggtttc

SEQ ID NO: 97 - DNA, 436 bp, Homo sapiens
  modified_base (288)..(288): a, c, t or g
  modified_base (328)..(328): a, c, t or g
  modified_base (366)..(366): a, c, t or g
  modified_base (374)..(374): a, c, t or g
  modified_base (419)..(419): a, c, t or g
  modified_base (431)..(431): a, c, t or g
ggcaaccctggccagatagctggaagagcagggttgctcttcaacctgcctcccggctcagttcactataagaaactatatgtatctcgtggatctgccagtaccagccttccaaatgaaactctttcagagttagagacacctgggaaatactcacttacaccaccaaaccactggggccacccacatcgatacctgcagcatctttagtcaagttgggaggagaaagacaacacttggtctaaggacacggcagcaagacatccctggcatattgtttccaggatnaaaaatggaaagctggttcacacccatttggcctccccantctgtttaaaacagctttcgtgttttagttttggaggntcagttanttggccctgttggaaaattccccaggagggcccccgttgtttcantgttttcccccnttcca

SEQ ID NO: 98 - DNA, 1232 bp, Homo sapiens
ctagaggggcggaaagtaacaaggaggtgggggtacaaatcctcagctcctgcttccgcaagcactaacctgctctgaagtgagccaggcagctctggccatcttttcccagccacagaatcaggtgatggtccagaattaagagctgtcacctgtgtcattcactcacaatggaagaaatgaagaagactgccatccggctgcccaaaggcaaacagaagcctataaagacggaatggaattcccggtgtgtccttttcacctacttccaaggggacatcagcagcgtagtggatgaacacttctccagagctctgagcaatatcaagagcccccaggaattgaccccctcgagtcagagtgaaggtgtgatgctgaaaaacgatgatagcatgtctccaaatcagtggcgttactcgtctccatggacaaagccacaaccagaagtacctgtcacaaaccgtgccgccaactgcaacttgcatgtgcctggtcccatggctgtgaatcagttctcaccgtccctggctaggagggcctctgttcggcctggggagctgtggcatttctcctccctggcgggcaccagctccttagagcctggctactctcatcccttccccgctcggcacctggttccagagccccagcctgatgggaaacgtgagcctctcctaagtctcctccagcaagacagatgcctagcccgtcctcaggaatctgccgccagggagaatggcaaccctggccagatagctggaagcacagggttgctcttcaacctgcctcccggctcagttcactataagaaactatatgtatctcgtggatctgccagtaccagccttccaaatgaaactctttcagagttagagacacctgggaaatactcacttacaccaccaaaccactggggccacccacatcgatacctgcagcatctttagtcaagttggaggagaaagacaacacttggtctaagacacggcagcaagacatccctgcatattgttccagataaaaatgaaagctgctcacacccacttgcctccccaatctgttaaacagcttcgtgtctagtatgagctcagtacttgccctgtgaaaatcccagaagcccccgctgtcaatgttccccatccacaccctgcttgctcctgtgtaacagctcagatgatgaataataataaaactgtacttttttggatggtgaaaaaaaaaaaaaaaaaaaa

SEQ ID NO: 99 - DNA, 558 bp, Homo sapiens
  modified_base (84)..(84): a, c, t or g
  modified_base (319)..(319): a, c, t or g
  modified_base (324)..(324): a, c, t or g
  modified_base (342)..(342): a, c, t or g
  modified_base (353)..(353): a, c, t or g
  modified_base (363)..(363): a, c, t or g
  modified_base (415)..(415): a, c, t or g
  modified_base (433)..(433): a, c, t or g
  modified_base (440)..(440): a, c, t or g
  modified_base (460)..(460): a, c, t or g
  modified_base (467)..(467): a, c, t or g
  modified_base (541)..(541): a, c, t or g
  modified_base (546)..(546): a, c, t or g
atgtatggcctatggacccccatcctagaaccagagaggacaatgatcttgattcccaggtttcccaggagggtcttggcccgnttctacagccccagcccaaatcctatttcaagagcatctctgtgaccaagatcactaaaccagatgggatagtggaggagcgccggactgtggtggacagtgagggccggacagagactacagtaacccgacacgaagcagatagcagtcctaggggtgatccagaatcaccaagacctccagccctggatgatgccttttccatcctgggacttattcctggggacgttggttncggtncccggtagccttgttaanccctcagaggnctttcaagtncttttccaccttttaacccattgcccaaccattaattaaggtttagtttttntttgcccacttaaggggntttgggntatgttggattagtgaattnggggccntgtcaattttttaattaacccaaattgaccattaaaacttttatttattgttaaaaaaaaaaaaaaatttcttnggccnaagttttttcct

SEQ ID NO: 100 - DNA, 1196 bp, Homo sapiens
acgtccggcttaccgtcgtttacgacagtgtcaggatcgcgggcttgctttccggtagcgtgggctgacgcctcgctcaatttctcacagggctgcgcaggtttcccccgtctgcgaatggaccactggaggggttcaaaggttcgcgtcccagtacgggaatgagcctctttgatctcttccggggctttttcggctttcctggacctcggagccacagagatcccttttttggagggatgactcgagatgaagatgatgatgaggaagaagaagaagaagggggctcatggggccgtgggaacccaaggttccatagtcctcagcacccccctgaggaatttggcttcggcttcagcttcagcccaggaggagggatacgtttccacgataacttcggctttgatgacctagtacgagatttcaatagcatcttcagcgatatgggggcctggaccttgccttcccatcctcctgaacttccaggtcctgagtcagagacacctggtgagagactacgggagggacagacacttcgggactcaatgcttaagtatccagatagtcaccagcccaggatctttgggggggtcttggagagtgatgcaagaagtgaatccccccaaccagcaccagactggggctcccagaggccatttcataggtttgatgatgtatggcctatggacccccatcctagaaccagagaggacaatgatcttgattcccaggtttcccaggagggtcttggcccggttctacagccccagcccaaatcctatttcaagagcatctctgtgaccaagatcactaaaccagatgggatagtggaggagcgccggactgtggtggacagtgagggccggacagagactacagtaacccgacacgaagcagatagcagtcctaggggtgatccagaatcaccaagacctccagccctggatgatgccttttccatcctggacttattcctgggacgttggttccggtcccggtagccttgttaaccctcagaggccttcaagtcctttccacctctcacccattgcccaccattaataagcttagcttctcttgccacctcaggggcttggatatgtggaatagtgaactggggccatgtcagtttgtcactcacccaaactgaccaataaaacctttatttatgctaaaaaaaaaaaaaaaaaaaaaaa

SEQ ID NO: 101 - DNA, 388 bp, Homo sapiens
  modified_base (1)..(1): a, c, t or g
ngaaaattatgtatttatttacacaaatatgcacagaacacttgtatctttcaaaagtcacacttaagacatagtaaaagcatgttgtatgaaccatgtattcttaaggattgagcaaactgcaggctgcttgctgccttttaggtttgctagtccctgatctacttgaaacagatgttgcttgccccaacactagtttaattataagggcagcctgtgagaaagtttcaatagacatttttctcacctatattgcacgtttttctgaaggcccttgtgcaagtgtgtgtgccatgtgtaggttctatttacatataaacggctactttaaaagtttatcaaaatcatggggttttttacaaaagtttttaatgctcttccgcattat

SEQ ID NO: 102 - DNA, 513 bp, Homo sapiens
  modified_base (420)..(420): a, c, t or g
  modified_base (440)..(440): a, c, t or g
  modified_base (457)..(457): a, c, t or g
  modified_base (467)..(467): a, c, t or g
  modified_base (491)..(491): a, c, t or g
gtaatcctcttgaatgccagtcattaaaggactttgcccttctacatcaaattacatccttttcacaaatccccatttctgtaataactggtgcaaacctaaaggtgctttatagttttactactttgcagatttgcaatgctgcatataatgcagaagagcattaaaaacttttgtaaaaactcatgattttgataaacttttaaagtagcgtttatatgtaaatagaactacacatgggcacacacacttgcacaagggcttcagaaaaacgtgcaatataggtgaggaaaaatgtctattgaaactttctcacaggctgcccttattaattaaaactagtgttgggggcaagcaacatctgtttccaagtaggttcaggggactaggcaaaccttaaagggcggcaggcggcctgcngtttgcttcattccttaggnttactgggttcctacanctggttttanttgtcttaggtgtggactttgganggtacagtgtttgtggcttttt

SEQ ID NO: 103 - DNA, 3351 bp, Homo sapiens
gcccgagaagctggggagcatggaccagaccccgcagcgctggcaccatgacgctcgcccgcttcgtgctagccctgatgttaggggcgctccccgaagtggtcggctttgattctgtcctcaatgattccctccaccacagccaccgccattcgccccctgcgggtccgcactacccctattaccttcccacccagcagcggcccccgacgacgcgtccgccgccgcctctcccgcgcttcccgcgccccccgcgggcgctccctgcccagcgcccgcacgccctccaggccgggcacacgccccggccgcacccctggggctgccccgccggcgagccatgggtcagcgtgacggacttcggcgccccgtgtctgcggtgggcggaggtgccacccttcctggagcggtcgcccccagcgagctgggctcagctgcgaggacagcgccacaacttttgtcggagccccgacggcgcgggcagaccctggtgtttctacggagacgcccgtggcaaggtggactggggctactgcgactgcagacacggatcagtacgacttcgtggcggcaaaaatgagtttgaaggcacagtggaagtatatgcaagtggagtttggggcactgtctgtagcagccactgggatgattctgatgcatcagtcatttgtcaccagctgcagctgggaggaaaaggaatagcaaaacaaaccccgttttctggactgggccttattcccatttattggagcaatgtccgttgccgaggagatgaagaaaatatactgctttgtgaaaaagacatctggcagggtggggtgtgtcctcagaagatggcagctgctgtcacgtgtagcttttcccatggcccaacgttccccatcattcgccttgctggaggcagcagtgtgcatgaaggccgggtggagctctaccatgctggccagtggggaaccgtttgtgatgaccaatgggatgatgccgatgcagaagtgatctgcaggcagctgggcctcagtggcattgccaaagcatggcatcaggcatattttggggaagggtctggcccagttatgttggatgaagtacgctgcactgggaatgagctttcaattgagcagtgtccaaagagctcctggggagagcataactgtggccataaagaagatgctggagtgtcctgtacccctctaacagatggggtcatcagacttgcaggtgggaaaggcagccatgagggtcgcttggaggtatattacagaggccagtggggaactgtctgtgatgatggctggactgagctgaatacatacgtggtttgtcgacagttgggatttaaatatggtaaacaagcatctgccaaccattttgaagaaagcacagggcccatatggttggatgacgtcagctgctcaggaaaggaaaccagatttcttcagtgttccaggcgacagtggggaaggcatgactgcagccaccgcgaagatgttagcattgcctgctaccctggcggcgagggacacaggctctctctgggttttcctgtcagactgatggatggagaaaataagaaagaaggacgagtggaggtttttatcaatggccagtggggaacaatctgtgatgatggatggactgataaggatgcagctgtgatctgtcgtcagcttggctacaagggtcctgccagagcaagaaccatggcttactttggagaaggaaaaggacccatccatgtggataatgtgaagtgcacaggaaatgagaggtccttggctgactgtatcaagcaagatattggaagacacaactgccgccacagtgaagatgcaggagttatttgtgattattttggcaagaaggcctcaggtaacagtaataaagagtccctctcatctgtttgtggcttgagattactgcaccgtcggcagaagcggatcattggtgggaaaaattctttaaggggtggttggccttggcaggtttccctccggctgaagtcatcccatggagatggcaggctcctctgcggggctacgctcctgagtagctgctgggtcctcacagcagcacactgtttcaagaggtatggcaacagcactaggagctatgctgttagggttggagattatcatactctggtaccagaggagtttgaggaagaaattggagttcaacagattgtgattcatcgggagtatcgacccgaccgcagtgattatgacatagccctggttagattacaaggaccagaagagcaatgtgccagattcagcagccatgttttgccagcctgtttaccactctggagagagaggccacagaaaacagcatccaactgttacataacaggatggggtgacacaggacgagcctattcaagaacactacaacaagcagccattcccttacttcctaaaaggttttgtgaagaacgttataagggtcggtttacagggagaatgctttgtgctggaaacctccatgaacacaaacgcgtggacagctgccagggagacagcggaggaccactcatgtgtgaacggcccggagagagctgggtggtgtatggggtgacctcctgggggtatggctgtggagtcaaggattctcctggtgtttataccaaagtctcagcctttgtaccttggataaaaagtgtcaccaaactgtaattcttcatggaaacttcaaagcagcatttaaacaaatggaaaactttgaacccccactattagcactcagcagagatgacaacaaatggcaagatctgtttttgctttgtgttgtggtaaaaaattgtgtaccccctgctgcttttgagaaatttgtgaacattttcagaggcctcagtgtagtggaagtgataatccttaaatgaacattttctaccctaatttcactggagtgacttattctaagcctcatctatcccctacctatttctcaaaatcattctatgctgattttacaaaagatcatttttacatttgaactgagaaccccttttaattgaatcagtggtgtctgaaatcatattaaatacccacatttgacataaatgcggtaccctttactacactcatgagtggcatatttatgcttaggtcttttcaaaagacttgacaagaaatcttcatattctctgtagcctttgtcaagtgaggaaatcagtggttaaagaattccactataaacttttaggcctgaataggagtagtaaagcctcaaggacatctgcctgtcacaatatattctcaaagtgatctgatatttggaaacaagtatccttgttgagtaccaagtgctacagaaaccataagataaaaatactttctacctacagcgtgc

SEQ ID NO: 104 - DNA, 473 bp, Homo sapiens
  modified_base (186)..(186): a, c, t or g
  modified_base (269)..(269): a, c, t or g
  modified_base (395)..(395): a, c, t or g
  modified_base (412)..(412): a, c, t or g
  modified_base (426)..(426): a, c, t or g
  modified_base (443)..(443): a, c, t or g
  modified_base (472)..(472): a, c, t or g
tttactctagtattccttgttctgggatcacttaatcactatttcgatgatgaaggaactctgaactcctaagcaaaccatgccatgacatactttatatatatgcacaaaagttggataaaacacaaaaccagcattttgacaaattcactttaaaatgttttccacatcaactacttaaaagangttacagcaatatgatcttccactgctcaggaagacagagtgaacttgggatatgatgaatattaaaaacaaacatacagagncacctggggtctgggacttgtggggctaaaggaaatgcttcctggaatttgtccgagggtgatgtgttgaggcaaccgtgccacagttcaccagcagtgacactctaggttcttcagtatattccngttgtggacccttttcnttggatttaatccnccggggtggttgccgcngtgtgagtctttaggcttttggaaatccnt

SEQ ID NO: 105 - DNA, 466 bp, Homo sapiens
  modified_base (118)..(118): a, c, t or g
  modified_base (411)..(411): a, c, t or g
  modified_base (449)..(449): a, c, t or g
caacaacaaaaatgccaagttgtcctgagcccttctgcgttgttatgccacttccctactgctcatatgcacgctggctcccctgggcacgcaaggatgagtatgggccatggcctgntagagctgcttacctggtgatgaccatgcaccttacaatttctgaacagttaaccctatagaagcatgctttatatgagtgtcttctgggaagaggaaccttcttaatctcttctgtgggattttcaaaatgctaaagactcacactgcagcaatcatcccagatgattaaattcaaagaaataggttcacaacagggaatatacttgaaggaactaggagtgttcactggctgggtggaactgtgggcacggttgcttcaacacatcacctcgggacaatttcagggaggcnttctttaggcccacagttccagacccggtgttctgtangtttgtttttaatattc

SEQ ID NO: 106 - DNA, 4132 bp, Homo sapiens
gatgacggtctcagcctcctcccgaccccttcctgcgcgtccgctcttcccctgcgcccgcccgcgcccctccgcccgcgccccggccccgccccaggcctcgcctccgcttcgccgccgccgccggccgcagccaggagcagcagccgcgcctgcagaccggcctcgcggagcccgcgcgccgagccccacaatggcttattcagaagagcataaaggtatgccctgtggtttcatccgccagaattccggcaactccatttccttggactttgagcccagtatagagtaccagtttgtggagcggttggaagagcgctacaaatgtgccttctgccactcggtgcttcacaacccccaccagacaggatgtgggcaccgcttctgccagcactgcatcctgtccctgagagaattaaacacagtgccaatctgccctgtagataaagaggtcatcaaatctcaggaggtttttaaagacaattgttgcaaaagagaagtcctcaacttatatgtatattgcagcaatgctcctggatgtaatgccaaggttattctgggccggtaccaggatcaccttcagcagtgcttatttcaacctgtgcagtgttctaatgagaagtgccgggagccagtcctacggaaagacctgaaagagcatttgagtgcatcctgtcagtttcgaaaggaaaaatgcctttattgcaaaaaggatgtggtagtcatcaatctacagaatcatgaggaaaacttgtgtcctgaatacccagtattttgtcccaacaattgtgcgaagattattctaaaaactgaggtagatgaacacctggctgtatgtcctgaagctgagcaagactgtccttttaagcactatggctgtgctgtaacggataaacggaggaacctgcagcaacatgagcattcagccttacgggagcacatgcgtttggttttagaaaagaatgtccaattagaagaacagatttctgacttacacaagagcctagaacagaaagaaagtaaaatccagcagctagcagaaactataaagaaacttgaaaaggagttcaagcagtttgcacagttgtttggcaaaaatggaagcttcctcccaaacatccaggtttttgccagtcacattgacaagtcagcttggctagaagctcaagtgcatcaattattacaaatggttaaccagcaacaaaataaatttgacctgagacctttgatggaagcagttgatacagtgaaacagaaaattaccctgctagaaaacaatgatcaaagattagccgttttagaagaggaaactaacaaacatgatacccacattaatattcataaagcacagctgagtaaaaatgaagagcgatttaaactgctggagggtacttgctataatggaaagctcatttggaaggtgacagattacaagatgaagaagagagaggcggtggatgggcacacagtgtccatcttcagccagtccttctacaccagccgctgtggctaccggctctgtgctagagcatacctgaatggggatgggtcagggagggggtcacacctgtccctatactttgtggtcatgcgaggagagtttgactcactgttgcagtggccattcaggcagagggtgaccctgatgcttctggaccagagtggcaaaaagaacattatggagaccttcaaacctgaccccaatagcagcagctttaaaagacctgatggggagatgaacattgcatctggctgtccccgctttgtggctcattctgttttggagaatgccaagaacgcctacattaaagatgacactctgttcttgaaagtggccgtggacttaactgacctggaggatctctagtcactgttatggggtgataagaggacttcttggggccagaactgtggaggagagcacatttgattatcatattgacctggatttagactcaaagcacatttgtatttgcctttttccttaacgtttgaagtcagtttaaaacttctgaagtgctgtctttttacattttactctgtcccagtttgaaacttaaaactcttagaatattctcttattatttatatttttatatttcttgaaagatggtaagtttcttgaagtttttggggcgtttctcttttactggtgcttagcgcagtgtctcgggcactctaaatattgagtgttatggaggacacagaggtagcagaatcccagttgaaaatgttttgatattttattgtttggcctattgattctagacctggccttaagtctgcaaaagccatctttataaggtaggctgttccagttaagaagtgggtgatgtagttacaaagataatatgctcagtttggacctttttttcagttaaatgctaaatatatgaaaattactatacctctaagtattttcatgaaattcaccagcagtttgcaagcacagttttgcaaggctgcataagaactggtgaatggggtaagcattttcattcttcctgctgaagtaaagcagaaagtactgcatagtatatgagatatagccagctagctaaagttcagattttgttaggttcaaccctatgaaaaaaactattttcataggtcaaaaatggtaaaaaattagcagtttcataagattcaaccaaataaatatatatatacacacacacatacatatacacctatatatgtgtgtatacaaacagttcgaatgtattttggtgacagtaataaatcaatgtgaggatggatagaatttagtatatgatagagaaaatgtcataaatggataaaaggaatttacaacttgaggagaaaacctttacaatttcctatgggtgtcagaagtactctcagcgaaaactgatggctaaaacagtatctactattctctgataactttttttttgagacagagtttcattgtcacccaggctggagtacagtggcatgatctcagctcactgcaaactctgcctcccgaattcaagtgattctcctgcctcagcctcctgagtagctgggattacaggcgcccgtcaccacacccaggtaatttttgtatttttagtagagacggagttttgccatgttggccaagctgatctcaaactcctgacctcaagtgatctgcccgcctcggcctcccaaagtgctgagattacaggcatgacccaccgcgtcaagcctctgacaactattgaatttgtaagctgctatgcaaatgggcatttatataaacttgtgatgtttcttgtcagaattctgagtactctgtgaagaacagaaatgatcatattcttatgcatctatctgtatgggtctgaaggtgtatatacaaactgagatgagtccttatgactcttgataagcctgagtttaacaacaacaaaaatgccaagttgtcctgagcccttctgcgttgttatgccacttccctactgctcatatgcacgctggctcccctgggcacgcaaggatgagtatgggccatgggcccctgtagagctgcttacctggtgatgaccatgcaccttacaatttctgaacagttaaccctatagaagcatgctttatatgagtgtcttctgggaagaggaaccttcttaatctcttctgtgggattttcaaaatgctaaagactcacactgcagcaatcatcccagatgattaaattcaaagaaataggttcacaacaggaatatactgaagaactagagtgtcactgctggtgaactgtggcacggttgctcaacacatcacctcggacaaattcaggaagcatttctttagcccacaagtccagacccaggtgctctgtatgtttgtttttaatattcatcatatccaagttcactctgtcttcctgagcagtggaagatcatattgctgtaacttcttttaagtagttgatgtggaaaacattttaaagtgaatttgtcaaaatgctggttttgtgttttatccaacttttgtgcatatatataaagtatgtcatggcatggtttgcttaggagttcagagttccttcatcatcgaaatagtgattaagtgatcccagaacaaggaatactagagtaaaaagcacctctttttcacaaaaaaaaaaaaaaaaaaaaaaaaa

SEQ ID NO: 107 - DNA, 273 bp, Homo sapiens
  modified_base (242)..(242): a, c, t or g
acaatattttatttactcatctaccaataaaacttttctaggaattcaacaataaaccaacattaaaagctttctagcataaatcaccaatttccaagataaccacaggccatctttaaaatacattttttattattattattattattatttgaaaaggtttgtggttatgtttctttaaaaagctgtttaattatatatgatgacatttttatagggtgaaatgatttgatgtctagggnttttcttcaaaataagggtaaggggtacagg

SEQ ID NO: 108 - DNA, 425 bp, Homo sapiens
  modified_base (1)..(1): a, c, t or g
  modified_base (96)..(96): a, c, t or g
  modified_base (353)..(353): a, c, t or g
naagattttgagtctatgaatacatacctgcagacatctccatcatctgtgtttactagtaaatcattttgttccttgcagaccccagatgggttncactgtttggtgggcttcaccctcacccataggagattcaattataaggacaatacagatctaatagagttcaagactctgagtgaggaagaaatagaaaaagtgctgaaaaatatatttaatatttccttgcagagaaagcttgtgcccaaacatggtgatagattttttactatttagaataaggagtaaaacaatcttgtctatttgtcatccagctcaccagttatccaactgacggacctattcatgtatcnttctgtacccttacctttatttttggaaggaaaatcctaggacatccaaatccttttcacctattaaaaaat

SEQ ID NO: 109 - DNA, 1438 bp, Homo sapiens
agcacttcctcatagaccttggatgtgggaggattgcattcagtctagttcctggttgccggctgaaataacctgaattcaagccaggaagaagcagcaatctgtcttctggattaaaactgaagatcaacctactttcaacttactaagaaaggggatcatggacattgaagcatatcttgaaagaattggctataagaagtctaggaacaaattggacttggaaacattaactgacattcttcaacaccagatccgagctgttccctttgagaaccttaacatccattgtggggatgccatggacttaggcttagaggccatttttgatcaagttgtgagaagaaatcggggtggatggtgtctccaggtcaatcatcttctgtactgggctctgaccactattggttttgagaccacgatgttgggagggtatgtttacagcactccagccaaaaaatacagcactggcatgattcaccttctcctgcaggtgaccattgatggcaggaactacattgtcgatgctgggtttggacgctcataccagatgtggcagcctctggagttaatttctgggaaggatcagcctcaggtgccttgtgtcttccgtttgacggaagagaatggattctggtatctagaccaaatcagaagggaacagtacattccaaatgaagaatttcttcattctgatctcctagaagacagcaaataccgaaaaatctactcctttactcttaagcctcgaacaattgaagattttgagtctatgaatacatacctgcagacatctccatcatctgtgtttactagtaaatcattttgttccttgcagaccccagatggggttcactgtttggtgggcttcaccctcacccataggagattcaattataaggacaatacagatctaatagagttcaagactctgagtgaggaagaaatagaaaaagtgctgaaaaatatatttaatatttccttgcagagaaagcttgtgcccaaacatggtgatagattttttactatttagaataaggagtaaaacaatcttgtctatttgtcatccagctcaccagttatcaactgacgacctatcatgtatcttctgtacccttaccttattttgaagaaaatcctagacatcaaatcatttcacctataaaaatgtcatcatatataattaaacagctttttaaagaaacataaccacaaaccttttcaaataataataataataataataaaaaatgtattttaaagatggcctgtggttatcttggaaattggtgatttatgctagaaagcttttaatgttggtttattgttgaattcctagaaaagttttattggtagatgagtaaataaaatattgtaaaaaaacttattgtctataaagtatattaaaacattgttggctaataaaaaaaaaaaaaaa

SEQ ID NO: 110 - DNA, 504 bp, Homo sapiens
aaagagcttttttatttgttaatgtcacataagaaatttaagcaagttacactatcttaaaaaacacaacgaatgcattttaatagagaaaccctgccctccctccacctccctcccccaccctcctcatgaattaagaatctaagagaagaagtaaccataaaaccaagttttgtggaatccatcatccagagtgcttacatggtgattaggttaatattgccttcttacaaaatttctattttaaaaaaaattataaccttgattgcttattacaaaaaaattcagtacaaaagttcaatatattgaaaaatgcttttcccctccctcacagcaccgttttatatatagcagagaataatgaagagattgctagtctagatggggcaatcttcaaattacaccaagacgcacagtggtttatttaccctcccctcctcataagaacttagaaaaaaaggaaagacacacatacaaaagaagtcaaaagatttgagagaaccc

SEQ ID NO: 111 - DNA, 2882 bp, Homo sapiens
gtgcagcctgagaggaaacaaagtgctgcgagcaggagacggcggcggcgcgaaccctgctgggcctccagtcaccctcgtcttgcattttcccgcgtgcgtgtgtgagtgggtgtgtgtgttttcttacaaagggtatttcgcgatcgatcgattgattcgtagttcccccccgcgcgcctttgccctttgtgctgtaatcgagctcccgccatcccaggtgcttctccgttcctctaaacgccagcgtctggacgtgagcgcaggtcgccggtttgtgccttcggtccccgcttcgccccctgccgtcccctccttatcacggtcccgctcgcggcctcgccgccccgctgtctccgccgcccgccatggcgactgcgacccccgtgccgccgcggatgggcagccgcgctggcggccccaccacgccgctgagccccacgcgcctgtcgcggctccaggagaaggaggagctgcgcgagctcaatgaccggctggcggtgtacatcgacaaggtgcgcagcctggagacggagaacagcgcgctgcagctgcaggtgacggagcgcgaggaggtgcgcggccgtgagctcaccggcctcaaggcgctctacgagaccgagctggccgacgcgcgacgcgcgctcgacgacacggcccgcgagcgcgccaagctgcagatcgagctgggcaagtgcaaggcggaacacgaccagctgctcctcaactatgctaagaaggaatctgatcttaatggcgcccagatcaagcttcgagaatatgaagcagcactgaattcgaaagatgcagctcttgctactgcacttggtgacaaaaaaagtttagagggagatttggaggatctgaaggatcagattgcccagttggaagcctccttagctgcagccaaaaaacagttagcagatgaaactttacttaaagtagatttggagaatcgttgtcagagccttactgaggacttggagtttcgcaaaagcatgtatgaagaggagattaacgagaccagaaggaagcatgaaacgcgcttggtagaggtggattctgggcgtcaaattgagtatgagtacaagctggcgcaagcccttcatgagatgagagagcaacatgatgcccaagtgaggctgtataaggaggagctggagcagacttaccatgccaaacttgagaatgccagactgtcatcagagatgaatacttctactgtcaacagtgccagggaagaactgatggaaagccgcatgagaattgagagcctttcatcccagctttctaatctacagaaagagtctagagcatgtttggaaaggattcaagaattagaggacttgcttgctaaagaaaaagacaactctcgtcgcatgctgacagacaaagagagagagatggcggaaataagggatcaaatgcagcaacagctgaatgactatgaacagcttcttgatgtaaagttagccctggacatggaaatcagtgcttacaggaaactcttagaaggcgaagaagagaggttgaagctgtctccaagcccttcttcccgtgtgacagtatcccgagcatcctcaagtcgtagtgtacgtacaactagaggaaagcggaagagggttgatgtggaagaatcagaggcgagtagtagtgttagcatctctcattccgcctcagccactggaaatgtttgcatcgaagaaattgatgttgatgggaaatttatccgcttgaagaacacttctgaacaggatcaaccaatgggaggctgggagatgatcagaaaaattggagacacatcagtcagttataaatatacctcaagatatgtgctgaaggcaggccagactgttacaatttgggctgcaaacgctggtgtcacagccagccccccaactgacctcatctggaagaaccagaactcgtggggcactggcgaagatgtgaaggttatattgaaaaattctcagggagaggaggttgctcaaagaagtacagtctttaaaacaaccatacctgaagaagaggaggaggaggaagaagcagctggagtggttgttgaggaagaacttttccaccagcagggaaccccaagagcatccaatagaagctgtgcaattatgtaaaattttcaactgtcttcctcaaaataaagaagtatggtaatccttacctgtatacagtgcagagccttctcagaagcacagaatatttttatatttcctttatgtgaatttttaagctgcaaatctgatggccttaatttcctttttgacactgaaagttttgtaaaagaaatcatgtccatacactttgttgcaagatgtgaattattgacactgaacttaataactgtgtactgttcggaaggggttcctcaaattttttgactttttttgtatgtgtgttttttctttttttttaagttcttatgaggaggggagggtaaataaaccactgtgcgtcttggtgtaatttgaagattgccccatctagactagcaatctcttcattattctctgctatatataaaacggtgctgtgagggaggggaaaagcatttttcaatatattgaacttttgtactgaatttttttgtaataagcaatcaaggttataattttttttaaaatagaaattttgtaagaaggcaatattaacctaatcaccatgtaagcactctggatgatggattccacaaaacttggttttatggttacttcttctcttagattcttaattcatgaggagggtgggggagggaggtggagggagggaagggtttctctattaaaatgcattcgttgtgttttttaagatagtgtaacttgcttaaatttcttatgtgacattaacaaataaaaaagctcttttaatat

SEQ ID NO: 112 - DNA, 197 bp, Homo sapiens
  modified_base (187)..(187): a, c, t or g
tttggcttgtgaatggattttttaataccaaaaaaactttaaaaattaaaaattgaaagaaaaaagtccagaaatttgacgttcttgaaaacatgatttatcacataatatatacatttactttgcttgtcacttgaaatgcctaggaaaacacaaaatcaatcttaaactggaaacttctattgantatgacatga

SEQ ID NO: 113 - DNA, 346 bp, Homo sapiens
cgaaatcctcacagggtggacctcgatattttaacctttacgatagctctgactgcctctgaagttatcaaccctctgatagaagaacttggttgcgataagtttatcaatagagaatagttaggtggtgacactacttcaagagaacctctgcattccagtcataccaatcctgcaacttgattttcagaagtcaagagtatatcgcgataagacagtgcacaggtgggaggggaaaaaaagggggagggggaagcttatcttggaaaaagcatcacagaagtaggaaaaaaatgtccgaaagcattattaactgttaacgttctttgagtttgtggattgatcc

SEQ ID NO: 114 - DNA, 1409 bp, Homo sapiens
acactgcatttacagcgcgcatagcgcccacgcacgcgcactggggtgtccgccgggcatcgctctgtccagttattccagtttctctgggagcagccgagttgaccccacggtctgagatgtccaagctgcccgcagacagcagtgtcccgcagacaggcgcggcgaatggtgacagagacgtcccgcaggcggaggtaggccgcgggaggcgggagccggccccggcacagcctgaggaggccggggaaggcgcgatggcggcggccaggggaggcccggtgccggcggccagggaaggtcggatggcggcggccagggcagccccggcggcggcagccaggggagccccggtggcagcggcggcgttggccagggcagccgcggcgggcagggaaagcccggcggcggcggcggccagggaagcccggatggcggaggtcgcccgcttgctgggggagccagtggacgaagagggtcccgagggcaggcccaggtccagacacgggaacggaggcctggctgcgttgccctatctccgtctccgccacccacttagcgttttaggcatcaattaccagcagtttctccgccactatctggaaaattacccgattgctcccggcagaatacaagagcttgaagaacgccgcaggcgattcgtggaagcctgcagagcaagggaagcagcgtttgatgccgaatatcagcgaaatcctcacagggtggacctcgatattttaacctttacgatagctctgactgcctctgaagttatcaaccctctgatagaagaacttggttgcgataagtttatcaatagagaatagttatgtggtgacactacttcaagagaacctctgcattccagtcataccaatcctgcaacttgattttcagaagtcaagagtatatcgcgataagacagtgcacaggtggaggggaaaaaaagggggagggggaagcttatcttgaaaaagcatcacagaagtagaaaaaaatgtcgaaagcattataactgtaacgttctttgagtttgtgattgatccacatttttccccctgcattatggaaaatgtctctcagcattgctttattacaaagtaaaggatggttttataaaattgagactgatgaaacatcaatactagagcccatgaggatgaaagaaattatcaaatagtgctgaacagaataagatgttaacgctgagttattaggactggaaggctatgaaaagaacttgaaattgtcggaatatgtgctctcttcatgtcatattcaatagaagtttctagtttaagattgattttgtgttttcttaggcatttcaagtgacaagcaaagtaaatgtatatattatgtgataaatcatgttttcaagaacgtcaaaaaaaaaaaaaaaaaaa

SEQ ID NO: 115 - DNA, 340 bp, Homo sapiens
  modified_base (139)..(139): a, c, t or g
  modified_base (189)..(189): a, c, t or g
  modified_base (222)..(222): a, c, t or g
  modified_base (312)..(312): a, c, t or g
  modified_base (337)..(337): a, c, t or g
atatgctttatttctaataagcacatatgttgttcctattatattaaccactgagctctttgttggaaagtaatgcttttattttcattttaatattttaacatttttcttttaattgcaattagacaaatgagatttnctttatatagttttaacagtcagaagtattttacttttaaaatctatganctagttaatggacaatattttaataatctgggnatattaaattcaaagtttaacatctgggcaaaactttgcttcacaaattcacttttttaggaatggatggggaatatatacaactcaggnatccatgtttaggggcaaatgcccnttt

SEQ ID NO: 116 - DNA, 2367 bp, Homo sapiens
aataggaaagctgcaaaacactgtggagtgctcccgtgtaaataaaaagaggaaaaaagtttctcaagtcgccgctgcacgacgtctggccggcgctggagcgggggtctgcgctctcccgagcggccgcgcgctggactttattgtgccgcaaccagccccagttcccattgtttgtgtttttttcaaaatatggcaaaggttcaggtgaacaatgtagtggtgctggataacccttctcctttctacaacccgttccagttcgagatcaccttcgagtgcatcgaggacctgtctgaagacttggaatggaaaattatctatgtgggctctgcagaaagtgaagaatacgatcaagttttagactctgttttagtgggtcctgttcccgcaggaaggcatatgtttgtatttcaggctgatgcacctaatccaggactcattccagatgcagatgcagtaggcgtaactgttgtgctaattacttgtacctatcgaggacaagaatttattagagttggctattatgtaaataatgaatatactgagacagaattaagggaaaatccaccagtaaaaccagacttttctaagcttcaaaggaatattttggcatctaatcccagggtcacaagattccacattaattgggaagataacacagaaaaactggaagatgcagagagcagtaatccaaatctacagtcacttctttcaacagatgcattaccttcagcatcaaagggatggtccacatcagaaaactcactaaatgtcatgttagaatcccacatggactgcatgtgaccacctaccatccctttagtacaaattaagctattaaaaatacacagaactatttccctgaattccgtaagtacatagtcaaaacacaatgtgaagaatttgtttaaaaacatcctgtagaaagtttataagaaaaccagtatttgaacaaattgtggaatataaatacaactatttttaagtaatttttttctctaatgtgttattttatttgttctgaaactaatctgattaaagcatatatattattttcttctcctttatatgtaatgaaagcacttataaagaaacaggaatcattagaccaggttgtaaagatgtcttggcctcccagacagtctttggaccactattttactggcctttgaaagaacaaagtttacttcaactaaaatgtttcttcctgtgaagacatatggtatcattttaatttaaggggcagatttccattcttttttggcatgtccttaaaaagaggatttgaaatcaactatatgctaccaagaactttaggatccaattttccaagccaccgtgaagcctcttatggctactattatagttcatgagatgttggacagcatttggtttgtttggtaagagaagaacaaatatggctaattgttaataaggtcccctggctatggtttttgttcttataacagagtttagaatatcagagcatttcttgaatcatacatcattattgtccagtgaattcaagaccgaatacaatatcgggagaaaatacaaactccctgtgtttaagaataggggattataatggctcaaattggttcatttgatttctaaaaataccatgacctttaaaaattcttttaatagatcatgttattggcagtatttatataaaaaccatggatttagaaaggtatatttagctttattataatagatacgttactattttggaaatatatatattttcacacctgtagtactcttccccatttcctctgacactcatgcagaatgagatcaggcatatttgtggttgacatactctagatagcttttccaacaaatctttgaaaagcaatcttggaaaggaattcattaactaaatggggtaaaaggtttctttttctttgagagttaagtccttcctcaaaaaattttcttatgctccataaaattgaggtagaatactttcattattcttgcagctaagcaagacagccatatgatgcaggttatgcagtgccttcatatctaaaacttttatactgcactttttaaagcttttatgttgaggaaaggaaaagggcatttgtctaaacatggattctgagttgtatatatttcctatcattctaaaaaagtgaatttgtgaagcaaagttttgccagatgttaaactttgaatttaatataccagattattaaaatattgtccattaactagttcatagattttaaaagtaaaatacttctgactgttaaaactatataaagaaaatctcatttgtctaattgcaattaaaagaaaaatgttaaaatattaaaatgaaaataaaagcattactttccaaaaaaaaaa

SEQ ID NO: 117 - DNA, 336 bp, Homo sapiens
gggctcccaaaactttttatttagagggaagaatgctagggagatgggtatgcagagggttgaccaaattggaagaaaatatttattctgtagtttggtgttggaaaagggaattttccaatcagccacacctcagtgttgcggcaaaataattcttggctcccctggaaacgcatgggcaaggtagggcagagctgctgctgctgatactgccaccaccctgggcttcctgctgactctgggctactccctggggacaacagatttgcattgacgtccggggctgtccagaggccctcaagagccagttgtgagctgagcccagtatgggaaaga

SEQ ID NO: 118 - DNA, 446 bp, Homo sapiens
  modified_base (1)..(1): a, c, t or g
  modified_base (3)..(5): a, c, t or g
  modified_base (100)..(100): a, c, t or g
  modified_base (374)..(374): a, c, t or g
  modified_base (412)..(412): a, c, t or g
  modified_base (441)..(441): a, c, t or g
nannngatttttattatatgaagatggtatacaaaatacattcatcatgactagaaatataggaccaaaccatgtctgtcttatatctgtagcatatatncttggtttgtataaaagtaactttaaaattccagtttccttaaatagttatgcacaaaacacacatacacccacacacacacacacacacacacacacacatacagttacaccactgtcgggccaaagatgcactcctcctttaatcaatttaaatgagggctaggcgaggtatctgtttgatgtttgcattcttgtgggggctagggaaacaagggcacggggtccctaaaattaacatctcgggtgttcacttcttggggactggacagggncacaggacttggcactgggggtttcaggcccctttccnccccggactgtttccccggtacatttttntcggg

SEQ ID NO: 119 - DNA, 3653 bp, Homo sapiens
attgcaacacatgcagctgcctggagagagggagccggtgtcctacgtcagagccgccgccgccgcgagccgccgccggggaggagcagccgctgccgcccaggactgggcccttagggaggaggaggcgagaagatggcggacgaccccagtgctgccgacaggaacgtggagatctggaagatcaagaagctcattaagagcttggaggcggcccgcggcaatggcaccagcatgatatcattgatcattcctcccaaagaccagatttcacgagtggcaaaaatgttagcggatgagtttggaactgcatctaacattaagtcacgagtaaaccgcctttcagtcctgggagccattacatctgtacaacaaagactcaaactttataacaaagtacctccaaatggtctggttgtatactgtggaacaattgtaacagaagaaggaaaggaaaagaaagtcaacattgactttgaacctttcaaaccaattaatacgtcattgtatttgtgtgacaacaaattccatacagaggctcttacagcactactttcagatgatagcaagtttggattcattgtaatagatggtagtggtgcactttttggcacactccaaggaaacacaagagaagtcctgcacaaattcactgtggatctcccaaagaaacacggtagaggaggtcagtcagccttgcgttttgcccgtttaagaatggaaaagcgacataactatgttcggaaagtagcagagactgctgtgcagctgtttatttctggggacaaagtgaatgtggctggtctagttttagctggatccgctgactttaaaactgaactaagtcaatctgatatgtttgatcagaggttacaatcaaaagttttaaaattagttgatatatcctatggtggtgaaaatggattcaaccaagctattgagttatctactgaagtcctctccaacgtgaaattcattcaagagaagaaattaataggacgatactttgatgaaatcagccaggacacgggcaagtactgttttggcgttgaagatacactaaaggctttggaaatgggagctgtagaaattctaatagtctatgaaaatctggatataatgagatatgttcttcattgccaaggcacagaagaggagaaaattctctatctaactccagagcaagaaaaggataaatctcatttcacagacaaagagaccggacaggaacatgagcttatcgagagcatgcccctgttggaatggtttgctaacaactataaaaaatttggagctacgttggaaattgtcacagataaatcacaagaagggtctcagtttgtgaaaggatttggtggaattggaggtatcttgcggtaccgagtagatttccagggaatggaataccaaggaggagacgatgaattttttgaccttgatgactactaggtagtcgacatgggtccggcaaaacgtgcctcaccctccagcatccaacccaaggagcatacccatggtggaatccaaacagatccctgccttacaattggaacatttccagaacttaatccatgagcattggatattgaaaagaaaaccgaaacaaaaccagacccagccctacactttggtttgtcatggtgtcagcgcagcagcctacaactaagttcctaaacgccactttggactaatttaaaaaagaatcccagtttttacttttactggatggtgaaattggttgctcttgtattttatgaaaaaaaatgatttttttaaccttcatacatagaagcaaaaatactttaactgctgtaaaccttcaaaagttaatagaagtgagatcatactggtttgtttcttattttgattggagaaaaattaaattgctgcatttcgcagtgacccatttacatggcattctcagcttagactgcgtaagaagaaatatatgtggtgaaatgttggaaccatttctctcttggtctctgtttaatgttgaaagggtgagctaataggaggcactttcaacttcactccctcacgctaccccgtccccctccagactggcagtttcaaggatgcaaattgcattgcaaaatcaaactgactcatgaagcatttgggccagtgcactgtttacttccatctgtttgcagacacatttgtgcccggcgtttgggagccctttgtatcaatgttctgacaagggtccctataaccttaacctactcgaaaccggtttgggatggatatgatggggcttctgtgctattgctgggattgggagaaataaaacatgcaatttaagtggaagcgaagaaatttaaagaggattttattttgcttgggtcaatccttgttaaaagggaggtggatgtgtttccttgtgttggatggcatgagattatgtgaatgttttgatttattaaaatgaactgcaaggtttttcacaggaacgacagacatgtatgactgcatgtaattataaactcctgacctcctggtggggttggagcatctgtttcaaatgtgggacttacaagcacttctcacatgagaaattaggggcgggtgggaagggatgggacacagcttctggcaccatggatttaagaccatgttggatccaaaagttggcctgaaaccctgaagctgatgcttcacagctgggctgtaagtcagacttgaacccagctgatatgcaaggtcatggcgtgccagggtggtgacagttgaacaaagtgtatagtacgtgcccagtggtagcgatggaaaaaagtataccaaatggactttgaaggaccaaaggttttaaaagtcaattggtatcacctccacactgactagggtagtggggtgcatttggttttcaaattgggtacttttaacactttagtgcctgactgctgttctttactgacttgattcagtcactcgtagctttattggtctgaaccagctccttgttcccaggttacagacctgcctatcgttccaataatcctgtttcacttgaatgaagggagtatgtcttaaatgtaaagtttctggttctcacactgtactctgaggtccaaatactgtctgtcaatgtgtaacctgatgtctcaaccccctgtgagaagagtccattatttggtgttcaccaacgtgggagacttcaccggaacaggcttttttgctttgggctctgctatttgtttgcagaacacccaagagcgagcaaacacgctctcttcacagcagtaccttagggttttgccattgtaaatgggtctgatgtgatatgacaagaccagagaaattggatgtaaatttacatttttgaatatgcttgttgtttcacatgatacatttagggtatgcagctccttttgtagtttttatttttactatttaagtttggaaatgatgccaaatttttgtatttctttaatcaatgtgttctcttcggtgatatatattgcattatatattgatgtgtgtatcaatatatattgatatgtattacacttacacatacaaacacatataagagggggtgaaaaccgtagcctttgcattctctatagcctctgcagagagatactaagcagcaaaatcttggtgttgtgatgtacagaaatggagaagagtattaaaccatatttaag

SEQ ID NO: 120 - DNA, 290 bp, Homo sapiens
ttttttttttttaaggtaacagacttttattacatcttcttttggaacttagaagacaatattagcctcctacacttttgagaattaaaatttagcccaccatcatttggccttggtagtgacatcacttgggtacagtgatgacagacagcctaaggggctggacctcagaagactaaaggtctagtcctggtccttccactaatgggctatggtgaccctgagcacattattccacttctaggtgattcagtttcctcatgactcataacaggaaatcattggtctca

SEQ ID NO: 121 - DNA, 4909 bp, Homo sapiens
ttcggagcgcgaagccgccgctgggacctcggcgcgccccgcgtctgcgcttgctgccgcgccccggtcggcgcgctgggagttccagccatgctcttctggcacacgcagcccgagcactacaaccagcacaactccggcagctacctgcgtgatgtgctcgctctgcccatcttcaagcaggaggaaccccagctgtcccccgagaacgaggcccgcctgccacccctgcaatatgtgttgtgtgctgccacgtccccagccgtgaagctgcatgaagagacgctgacctacctcaaccaaggtcagtcttatgaaatccgactactggagaatcggaagctgggagactttcaagatctgaacacaaaatatgtcaagagcatcatccgtgtggtcttccatgaccgccggctgcagtatacggagcaccagcagctggagggctggcggtggagtcggccaggggaccggatcctggacatcgatattccactgtctgttggtatcttggaccccagggccagcccgacccagctgaatgcagtcgagtttttgtgggaccctgcgaagagagcttctgcattcattcaggtacactgcatcagcacagaattcacccccaggaagcacgggggcgagaagggagtgccctttcgagtccagattgacacgtttaagcagaacgagaatggggagtacacggagcacctgcactcagccagctgccagatcaaggtgttcaagccgaagggagccgatcggaaacagaagactgaccgggagaagatggagaaaagaactgcccaagagaaggagaaataccagccgtcctatgaaaccaccatcctcacagagtgctctccatggcccgacgtggcctaccaggtgaacagcgccccgtccccaagctacaatggttctccaaacagctttggcctcggcgaaggcaacgcctctccgacccacccggtggaggccctgcccgtgggcagtgaccacctgctcccatcagcttcgatccaggatgcccagcagtggcttcaccgcaacaggttctcgcagttctgccggctctttgccagcttctcaggtgctgacttgctgaagatgtcccgagatgatttggtccagatctgtggtcccgcagatgggatccggctcttcaacgccatcaaaggccggaatgtgaggccaaagatgaccatttatgtctgtcaggagctggagcagaatcgagtgcccctgcagcagaagcgggacggcagtggagacagcaacctgtctgtgtaccacgccatcttcctggaagagctgaccaccttggagctgattgagaagattgccaacctgtacagcatctccccccagcacatccaccgagtctaccggcagggccccacgggcatccatgtggtggtgagcaacgagatggtgcagaacttccaagatgaatcctgttttgtcctcagcacaattaaagctgagagcaatgatggctaccacatcatcctgaaatgtggactctgagcagcagtggacctcatacctgtctccagctcccagccctgtggatccccgtggatgtagacattgccccactgtaagctgtggcctcaccaggcaagctgaggccaggagggaccctgcccagtctgtgaaagctacagagcaccaaccagcagaagcctgtggacaccaagtacggtgtacagaaagccagtggctcctttctcccttcctcttggcctccagattttgaatggttccttgttcttttctattggtccaaccctgacgttctaaaagggcaaacagtggagacgtctgctctgaaatccctcatcccttagttggaagctgattgggtatcttggtgctgcctgtattggtcccttctgaccactctcctgcctccagagaaagctctgcttcaccctgaaagctggtacctttacctcctcctctgggagttggctgcatggccagcactgccgacttgatgggagcagtttgccctcattctcctgtttcaggtttgcttcccttctcagtgaccctggtgagcatccgcctttcctgttcttggatgaattgatgggagtggggctattctgtgccttctacctctttcttctctacgttgtttctaaggatctgctgctgcggaacccaaagatgtgctcctgtctctgcactggcgcattggcatggtagatgccacaatgtatgtgcacggcctttctcagagacattagttctgaggccctttgtggggaggttagggggatggtaatagaaaaagactattttatttcctggcaatcacgggtaaggaggattaggaatgagtattccattcctaggtgtcatcagatgaccttgaccaccacaataccaggccctcttggatggacttatagaaagttagagaagaccttgttgaaccgctgctaaacttgccacaggagcgatgtgttttctctgagtgcccctcacttacatgtttatctttgtttgtagaggctatgtttaggatattttgcctgcatcagaatgggtgcatcatctttcttaatggcctatcgggaaatttgagtgtcagtaactgtggtagactcagaaattcgtctttgtcttgcctctggttcctgggatccagtgatctctactggcccagggcttcagctcttggttaatttaggttcatggggaaccctctgaccacctgaatgggatgtcatagcttctaaatggagcttctgtggaatgaagtgctagactgaaggactaccagaataaaacagggtctacaatggggagaacttgttttatagatgaggaaaccaaggctcagaggggcaaagtcacctgcatggtagcacatagtgatagggtagcgatataaatttatcatataaaccaggacatctcggaataaaaggggctctgttagtcattatgttgggtaatagccatggcattcctacagaacagagtgaggacaggctcctgattcctcttccttctttagagagaagcggggagtgggttaactaacagctttattgagatgtcattcacatgccattcagtttacccattgctagtgtccaattgtattcacagaaccaccatcaattcacagaattacagtcaacgttggtacattttcatcacccccagtaaaaccccgtacccttggtctgtcactcctgctttcctaactcctgcagtccaaggcagccatgaatctactttctatgtaagattaacctactctggacatttcatatatctggaatcatgtgatatctcttttgtgactggcttcttccactgaatgttttctagggccgtccaagttgaggatgtatcagtacttcattcttttgtattgctgaataatacttcattgtatagatagaccacatttgtttattgattcatcagttgatggacatttgtgtgtttttactttttggctactctgaatgatgctgctatgaacatatttctacaagattttgtgtggacatatgttttcatttcttttagcaatatacataggagtggaattgctaggtcttacagtaactccgtgttttaactttttgagaaactgccagactgttttctatagcagctgtaccattttacattcccaccagcaatgtatccaggtttcaatttgtctacatcctcatcaacacttgctattatctgtctttttgcttttagcatcctaatgagtatgaaatgctatcttgtggttttgatttgcattcccctgatggcaactgatgctgagtgtcttttcctgtgcttacgggccatgcgtatttctttggagaaaggtctatccaggtcctttgcctatttttaattgagttgtcttttttttttaagttttctgttttcctaaccactagactaccagggatgagccttctttttattattgagttgggtgagctatttgtatattctagacgccagtcttttatcaggtatatgactggtaaaaatgttctccccttctgtggattgttttcagtttcttgttggtgtcctttgagacacaaaactttttaactttgatgatttccaagatacgtattttttttctattgtcacttgtgcttttggtgccatatctagaaaaccattgcctaatccaaggtcaagaagattaatgcctgtgttttcttctaagaacttgtatagttttagttctcacaatggtctttgatccatttcgagtatatttttatatatgatgtgatgtaggggtccagcttcattcttttgcttgtggatctccacttgtcccactgctgattattgagaaaaatatcctttctccacggaattgtcttggcatccttgctaaaggcctctgcttcttactggatcttctttcctgggacatggtgtcgttgggaagcttacctttttttttttttacttagtctgtgtttggttccaccagttttatgctgcctttctactctgttcttgctgtctccctctttacctgagtcaacggtactgagtcctatctctctctgatgttccccagtcttccttggtgcatgttctagctccacacactagtccttggaggaaggttgagaccaatgatttcctgttatgagtcatgaggaaactgaatcacctagaagtggaataatgtgctcagggtcaccatagcccattagtggaaggaccaggactagacctttagtcttctgaggtccagccccttaggctgtctgtcatcactgtacccaagtgatgtcactaccaaggccaaatgatggtgggctaaattttaattctcaaaagtgtaggaggctaatattgtcttctaagttccaaaagaagatgtaataaaagtctgttacct

SEQ ID NO: 122 - DNA, 416 bp, Homo sapiens
  modified_base (203)..(203): a, c, t or g
catttataatttttagttttcttttcttttcttttcttttctttttttttttttttctgagacggagcttgctctgtcgcccaggctggagcgcagtggcaattctggactcactgcaagctctgccttccgggttcacgccattctcctgcctcagcctcccgagtagctgggactacaggcgcctgtcaccacgcccgganaagtttttttggtataatacttagttttctttgtagctaacttagtcttccaaagtccttcaagtcctctcagttgtgcttcccacccagccagtcatcagataaggctgttcttccctgttgctgctgccctgcctgctttctgggacctgcttcctgccttgggagttgggatccctccatttttgaactccaggggccttcggtttgttc

SEQ ID NO: 123 - DNA, 436 bp, Homo sapiens
atcttgagtcgacctcctatctcattctgtaacctagaatgcctaactgtctgggaatgcagcccagtaggtttcagcctcattgtccccagcccctattcaagattcagttgctctagttcaaatgcctctgacagttgtgcttcaccaaacctagagaatgaacaaagcgaaggacctggagttcaagaatggagggatccaactccaaggcaggaagcaggtccagaaagcaggcagggcagcagcaacagggaagaacagcttatctgatgactggctgggtgggaagcacaactgagaggacttgaaggactttgggaagacttaagttagctacaaagaaaactaagtattattaccaaaaaaacttattccgggcgtggttgacagggcgcctgttagttcccagctattcggggaggctgaggcaggg

SEQ ID NO: 124 - DNA, 4122 bp, Homo sapiens
aggaggcgacagctgccagccgaggaggcgcggcggagaggggactgcggtcagctgcgtccacttggggctgtgcggcggtcccgcgcccggcgatgttcccgggcactccctgagtagcggcagcttatcccccgcccgctagcccgccctggtccccggctcgctcgctggctggcgcggccccggccccgctctgcgtcggccccgccgcggtggaggcgcgcgagggggacgcggccggggatgagcggattgcgggtgaactcgccgccggggccccgcgaagccgtgagccgctgcttttctccgagtcgccgccctgcccttggatttgagatcatgtccatccacatcgtggcgctggggaacgagggggacacattccaccaggacaaccagccgtcggggcttatccgcacttacctggggagaagccctctggtctccggggacgagagcagcttgttgctgaacgcggccagcacggtcgcgcgtccggtgttcaccgagtatcaggccagtgcgtttgggaatgtcaagctggtggtccacgactgtcccgtctgggacatatttgacagtgattggtacacttctcgaaatctaattgggggcgctgacatcattgtgatcaaatacaacgttaatgacaagttttcattccatgaagtaaaggataattatattccagtgataaaaagagcattaaattcagttccagtaattattgctgctgttggtaccagacaaaatgaagagttaccttgtacatgcccactatgtacctcagacagagggagctgtgttagtacaactgaagggatccaacttgcaaaagaactaggagcaacctatcttgaactccacagccttgatgacttctacataggaaagtattttggaggagtgttggagtattttatgattcaagccttaaatcagaagacaagtgaaaaaatgaagaaaagaaaaatgagcaactcctttcatggaattagaccacctcaacttgaacaaccagaaaaaatgcctgtcttaaaggctgaagcgtcacattataactctgacttaaataacttgctgttctgctgccagtgtgtggacgtggtattttataaccccgatttaaagaaagttgtagaggcccacaagatcgttctctgcgctgtaagccatgttttcatgctgcttttcaatgtgaagagtcccactgacattcaggattccagtatcatccgaactacccaggatctttttgctataaacagagatactgcatttccaggtgctagccatgaatcttcaggcaacccaccattacgagtcattgttaaagacgccctcttctgttcttgtttatcagacatccttcgcttcatttattcaggtgcttttcagtgggaagaattggaagaagatatcaggaagaagttgaaagattctggggatgtttcaaatgtaatcgagaaagttaaatgcattttaaaaacaccaggaaagattaattgcctaaggaattgcaaaacctatcaagccagaaaacctttgtggttttataacacttccctcaagtttttccttaataagccgatgcttgccgatgttgtcttcgaaattcaaggtacgacagtgccagcccacagggccatcctggtggcccgttgtgaagtgatggcagccatgtttaatggtaattacatggaagcaaagagtgtcctgattcccgtttatggtgtttccaaagagactttcttgtcatttttagaatacctgtacacagactcctgctgcccagctggcatattccaggccatgtgtctcctgatctgtgccgagatgtaccaagtgtccagactgcagcacatctgtgagctgttcatcattacccagctgcagagcatgccaagcagggaactggcatccatgaaccttgatatagttgacctgcttaaaaaggccaagtttcaccactctgattgcctttcaacctggctacttcatttcattgctactaactacctcatcttcagtcaaaagcctgaatttcaggatctttcagtggaagaacgcagttttgttgaaaagcacagatggccgtcgaatatgtacttgaagcagcttgcggaatacaggaagtatattcactcccggaaatgtcgttgcttagtaatgtaacctggagcttttatacactacatttcttttttattattatgaagaatgggatacctccaggttccagtaaaattcttctgaccgaaaccaatgtgggtgttagaaaaattaccatatagcttaatatgtttattagttctctttggaaaaaaactaccactgtggtcttaaaagggaacaaaatataccataggctaaaactaaggctttcactctagaatgcaaagctgttttgcagctgttttcccttaaagatgtcctgttgctttagtgatatttagacccctctcagttaagaaatgcttagattaaaaaaaaaaaattacgtaggattaatacagaaatttaatcatgtctgattaattgctctattaaaataaggggcatttaaagacccagcataaccatttgtataatgagaaatctaggggaaaaccaatcagtccaacatgagattttaggaatagaaatttgccggccatttggaaagtgaaatgccacttagttctcaattgatgacagtgtttgaatcatcataaaaaaaatacctgcttttcatctggacaacccaattgagccactttatctccttttggcaatctgagtaggcggggaacctaggcagggctggctttcttagcgtgtaacttgtgtagcagcacagggcccacacttagaaggaccccacacttggttcaaggctctgctatagcggaaattcttaataatgtttgaagaagggccccatgatttcattttgtgctgagccctcaaaattatgtctgtttcgtggtgggaaatatcctatgttttcttgctcaaacacctttctctctgaaagcagaaaaaggcactgatataaagggaagagaaggaggctcaccggagggaagagaacatagtgaagattcccgcctttggggaggtctggaccacccagggcctccactgccaccttggctggcaagggagaaatgtgttgtgttgtcttagctttaaaacagtcacagttcttgctctatcatagatgaacaaatactttcttgatcattctgtaagaccaggaggttggtaagagtgactaaccagcctaactttaatacacatgtataaagatgttcacagagaaagatgctctgtagagaatttgctaccgaagttggctcaagaatttgtttttagtgttatttaccaagattaggacgtcagtggcttaaattctttgaattcttttcaaggactgcaagattatttgataaagagtagcatgaatcttgtgctctaatattacacagtaagttcaaagaaaggatgtaagtcaaagacttgttacatagagggaaaatggactgggatagaggacagactgatagtttctttctttcatatcacatgtatagagaaataattatatcagaaactcacaaacctagacatggaaaaacagattactgtctattgtcagcatcattttcatctgtaagtcactactggaatatatttttcttttaatttccagtgactttagaatacacacagtttttccgacttttcaaaaatttgattaaatggttttatagtataatattgggaccccataccgttagcccttgtatgtataccaacactgccaaagtaaaacattaggtcaggcatggtggctcaggcctgtaatcccagcattttgggaggctgaggcaagtggataacttgaggtcatgagttcgaaaccagcctggccaaaacagtgaaaccccgtctctactaaaaatacaaaattagccagatgtggtggcgcacacctgtaatcccagctactcaggaagctgaggcaggaaaatcgcttgaacctgggaggtggaagttgcagtgagccgagatcgcaccactgcactccagcctgggtgacaagagcgaaactccatcacaaaaaaaaaaaaaaaa

SEQ ID NO: 125 - DNA, 507 bp, Homo sapiens
ttttgtcaataaaactttaggaatatctgcacatgtacatttacattcaagttgataacactggtggtttcatttcaatacaaattatgctagagaactgacatttcagacatggtcatatatatgctatttgaattcctttatcttgatacagatcttgattgtgaatctcttgatgatagatgtgcagctaatttgtcccgaaactcatgaagataattgtattgcttgatggtctgtattgccccggatcctcttaggtctcgcaggctgtctatggcttgctctggtgatattgtgtcagacaggtatagtaggagacaagcagctacaagacaagatctcccaagtcctccatagcagtgtattaaggtttttcggtaatttttaaggcaggttgtaagctcttccattatttcacagcagctggctatgtcaggagtcctccatctgcgattggatgatgatgggtgataatccacattgctggtagagatccagaaggtt

SEQ ID NO: 126 - DNA, 836 bp, Homo sapiens
ccggtgagtcgccggcgctgcagagggaggcggcactggtctcgacgtggggcggccagcgatgaagccgcccagttcaatacaaacaagtgagtttgactcatcagatgaagagcctattgaagatgaacagactccaattcatatatcatggctatctttgtcacgagtgaattgttctcagtttctcggtttatgtgctcttccaggttgtaaatttaaagatgttagaagaaatgtccaaaaagatacagaagaactaaagagctgtggtatacaagacatatttgttttctgcaccagaggggaactgtcaaaatatagagtcccaaaccttctggatctctaccagcaatgtggaattatcacccatcatcatccaatcgcagatggagggactcctgacatagccagctgctgtgaaataatggaagagcttacaacctgccttaaaaattaccgaaaaaccttaatacactgctatggaggacttgggagatcttgtcttgtagctgcttgtctcctactatacctgtctgacacaatatcaccagagcaagccatagacagcctgcgagacctaagaggatccggggcaatacagaccatcaagcaatacaattatcttcatgagtttcgggacaaattagctgcacatctatcatcaagagattcacaatcaagatctgtatcaagataaaggaattcaaatagcatatatatgaccatgtctgaaatgtcagttctctagcataatttgtattgaaatgaaaccaccagtgttatcaacttgaatgtaaatgtacatgtgcagatattcctaaagttttattgac

SEQ ID NO: 127 - DNA, 323 bp, Homo sapiens
  modified_base (149)..(149): a, c, t or g
  modified_base (152)..(152): a, c, t or g
  modified_base (202)..(202): a, c, t or g
  modified_base (207)..(207): a, c, t or g
  modified_base (242)..(242): a, c, t or g
  modified_base (264)..(264): a, c, t or g
  modified_base (286)..(286): a, c, t or g
  modified_base (296)..(296): a, c, t or g
  modified_base (305)..(305): a, c, t or g
ttttaattaagacacaagttgagtaagcagcctccacaggctgtattcccaggcccccgcccaccctgacctttggcccagaagctactgcttcagtgtgtggggtggaggagtgagactgggtccacagtgacattattgctgacctnttntgtgtgaggaaaaaggccacgagaccctttgtggggccagccctgagtgntcctntcccaagttttaaggcagggagggggaaataactntacagcccttttagcccccagntttgggagtgggcagacagcantgagggccanatcccgggngcttcccggggggaagtt

SEQ ID NO: 128 - DNA, 414 bp, Homo sapiens
  modified_base (8)..(8): a, c, t or g
  modified_base (346)..(346): a, c, t or g
  modified_base (370)..(370): a, c, t or g
  modified_base (382)..(382): a, c, t or g
  modified_base (409)..(409): a, c, t or g
ggccaagngtcaaggccaactgagaagcatggcctagataggcgcccacctaagtgcctcaggactgcaccttagggcagtgtccgtcagtgccctctccacctacacctgtgaccaaggcttatgtggtcaggactgagcaggggactggccctcccctccccacagctgctctacagggaccacggctttggttcctcacccacttcccccgggcagctccaggggatgtgggcctcattgctgtcttgccactccagagctggggggctaaaagggctgttacagttattttccccctccctgccttaaaatttgggggagagggagcatttaggggtttggncccacaaagggttttcgttgggcntttttttccttnacaaaggaaggagggttcagcaattantgttc

SEQ ID NO: 129 - DNA, 1501 bp, Homo sapiens
cagaaagtcggcccagcagatgaggaagtggcaggcaggcaggctggccccggggacttctctctggccctgctccctccgagcgctccgccgttgcccgcctggcccctacggagtccttagccaggatggaggctgttgtgaacttgtaccaagaggtgatgaagcacgcagatccccggatccagggctaccctctgatggggtcccccttgctaatgacctccattctcctgacctacgtgtacttcgttctctcacttgggcctcgcatcatggctaatcggaagcccttccagctccgtggcttcatgattgtctacaacttctcactggtggcactctccctctacattgtctatgagttcctgatgtcgggctggctgagcacctatacctggcgctgtgaccctgtggactattccaacagccctgaggcacttaggatggttcgggtggcctggctcttcctcttctccaagttcattgagctgatggacacagtgatctttattctccgaaagaaagacgggcaggtgaccttcctacatgtcttccatcactctgtgcttccctggagctggtggtggggggtaaagattgccccgggaggaatgggctctttccatgccatgataaactcttccgtgcatgtcataatgtacctgtactacggattatctgcctttggccctgtggcacaaccctacctttggtggaaaaagcacatgacagccattcagctgatccagtttgtcctggtctcactgcacatctcccagtactactttatgtccagctgtaactaccagtacccagtcattattcacctcatctggatgtatggcaccatcttcttcatgctgttctccaacttctggtatcactcttataccaagggcaagcggctgccccgtgcacttcagcaaaatggagctccaggtattgccaaggtcaaggccaactgagaagcatggcctagataggcgcccacctaagtgcctcaggactgcaccttagggcagtgtccgtcagtgccctctccacctacacctgtgaccaaggcttatgtggtcaggactgagcaggggactggccctcccctccccacagctgctctacagggaccacggctttggttcctcacccacttcccccgggcagctccagggatgtggcctcattgctgtctgccactccagagctgggggctaaaagggctgtacagttatttccccctccctgccttaaaacttgggagaggagcactcagggctggccccacaaagggtctcgtggcctttttcctcacacagaagaggtcagcaataatgtcactgtggacccagtctcactcctccaccccacacactgaagcagtagcttctgggccaaaggtcagggtgggcgggggcctgggaatacagcctgtggaggctgcttactcaacttgtgtcttaattaaaagtgacagaggaaaccaaaaaaaaaaaaaaaaaaa

SEQ ID NO: 130 - DNA, 338 bp, Homo sapiens
  modified_base (334)..(334): a, c, t or g
cggcacgagggtaagcctcccaacaaaaagttctagttgtgctttgtacaactgagtgaactatttatctcacaactcttcacctacagccttactatgcacactttactttctccttcctcatctgaaatcaaatttaggcagcatttctttgatgttaacaaagccattaaaaatgaacatatttcagtatattacatgtggtctctgtgaggacaattgctttaaaaagtcttgtactattctagacaaattaatggatattttggcatactatgtacagtattaatgttgtgatgaggataaagtctcattaaaaattgaaaataaatanaaaa

SEQ ID NO: 131 - DNA, 1770 bp, Homo sapiens
ccacgcgtccgcacttccagggtcggggagacggaactgcggcgaccatgtatttctggtttatcaaaccgctaacacccagtctaagggcaggttctgtcccattgttatcactatcgaagcagccgatggaggaggggaggtctgagcagagggcggggtgcaggcggaatggccctcgtgccctatgaggagaccacggaatttgggttgcagaaattccacaagcctcttgcaactttttcctttgcaaaccacacgatccagatccggcaggactggagacacctgggagtcgcagcggtggtttgggatgcggccatcgttctttccacatacctggagatgggagctgtggagctcaggggccgctctgccgtggagctgggtgctggcacggggctggtgggcatagtggctgccctgctgggtgctcatgtgactatcacggatcgaaaagtagcattagaatttcttaaatcaaacgttcaagccaacttacctcctcatatccaaactaaaactgttgttaaggagctgacttggggacaaaatttggggagtttttctcctggagaatttgacctgatacttggtgctgatatcatatatttagaagaaacattcacagatcttcttcaaacactggaacatctctgtagcaatcactctgtgattcttttagcatgccgaattcgctatgaacgggataacaacttcttagcaatgctggagaggcaatttattgtgagaaaggttcactacgatcctgaaaaagatgtacatatttacgaagcacagaagagaaaccagaaggaggacttataattggctataatttataagaatgttgtcattgagtgtgtcacttaaggtcttagactgcaaatctaaccatatttaatgaaatgtcttactgtacaaaaagtctaagccaaaggttctcaggggagaaagcacatgtgcagttttaaaacaaagcagtgctttgtcccattgctgtgatttttagtcagactttactcagtctgaaatgcaattaacattaaaggattaagtgtgagatttcgatttatgctatttgtgtatcccatactcctcccttttaataaacagtttccactgatgatatgaagggccggtataaagaagtctttaaatgagtaagctttcttggtaagattaaatcttacaaattatttttaaaaccttgtgatatatacaatgtttagctgagttttctaattttctggatgtaaaacaaaaggtttaacctatacattccttgagctgttagtgctatttaaatcttttgccctgtttaggtcctaaacacttttagttgagtaggatatgagcttttttgggtctcatatcatgctttttgccttaatttcaggtatatatatatataagtaaaggaattaagtaaaaataaaatttcagttactttttaaaagcacctgaaatctggccggatgcggtggctcatgcctgtaatcccaccactttgggaggccgaggcgggcagatcacctgaggtcgggagttcaagaccagcctggccaacatggtgaaaccccatctctactaaaaatacaaaaattagccgggcgtggtgtcgggcgcctgtagtcccagctgctcgggaggctgaggcaggggaatcgcttgaacctgggaggcggaggttgcagtgagctgagattgcgccattgtactccagcctgggggacaggagcgagactccatctcaaaaaaaaaaaaaaa

SEQ ID NO: 132 - DNA, 391 bp, Homo sapiens
  modified_base (331)..(331): a, c, t or g
  modified_base (388)..(388): a, c, t or g
gctgttgtttttttctgttttgtaataaccaaaattgaatatttccaaggataagttaagtaaactatttgtgttcagactatattactgtggataaattcagaacagcttttgaaatactggccttattagataatcaaagagcataaaaattatacaaaataagaagagtaaaacatctcttaaggaaggtaaaaatatgggaactgggcaacaaatatatcagttttaaataaaagcttctcatcaaactgggtcttcagtccaattatctcaatgccacgctttgactatattcaccttcctttctaagggcatcagaaggtcaccngagttggtaaattctggaaaaggcttcaataatttatgtaggccggataatttcttntag

SEQ ID NO: 133 - DNA, 504 bp, Homo sapiens
  modified_base (378)..(378): a, c, t or g
  modified_base (384)..(384): a, c, t or g
  modified_base (417)..(417): a, c, t or g
  modified_base (427)..(427): a, c, t or g
  modified_base (486)..(486): a, c, t or g
cacaactacagggtttgcagttacaaccaaggtacacctctcctgatgaatcaccagctgtggtatcagtaaataaccagccgtcctctagtccttcaggacttctggatacaataggaagtgctgtaatgaataataattctctactgcttggtcaaagtcatagccttcaaagagatacatgcttaacccaaaacaatagtactgcctccaccatgggtaaccttccagaaccagatcaaaatctagttgcaatggacgagctggtagaagttggagatgttgaggatacagggaatctgggaagggaactgttcatcgggttctgttggggagatgtggcagactatttccaatacaggtttttaggacaaccantcaggntcttatttgaaggaaattccaggaaagttaccntttttgtggngccagtttaaacaggaaccccaaggaaccagcttgtccatgggaggcaaaaaaaccgtngggttttagggatttttc

SEQ ID NO: 134 - DNA, 3438 bp, Homo sapiens
gccgcggagaaggagccggaccccttgggcggagcgcccaatgtgtggtccctcacgccgtcccgcaccttgctttttagggttctttttccgctttctgagcccttttataccttacgtttagaaggggaaaatcatcctcccacaccttctccccgactttttgccttttttgtcttgaagttacccaaaggcctgtgtattgttctcaatggtcccaagaattactctaatatagttgtttttctgagggaggatggatggagataactatcctgatcccaatgtcactttttaaggcattcgcttcaagagacaagcagtttagaatcaggcagaactggattgcaaaatttatgggcagaccgagaaaatgctgctgtgaagacccaattaaagctttcacataaatgaagctacagctatcatgatttagtgcccccaaaaggaagaacttcagtggacaagaaaggacatttctgggggtagtagaatgcttgaggcctggaatttaaacctgagccactatctgaaggtttaatatatctttgccaagtccaagggtacaaagattttctcctgtgttttcttctagaagttttatcatttgatagtctgtgatccatttcaagttgatttgctatctggtgtgagctattaaataatagaagaaaatggaattgaatatgatgtcagcatggaacaatctaatgattcattaagagtcaaccataatgacggtgaagagtcaaaaaccagtgctcaagtatttgagcatctaatctgtatggactccagggattcttcctttggacaaaatgattctcctacagttttgcccatcactactcgtgaagcaaataattcactcatatcacagaatataccagggcccctgactcagacacagactctttctgcagagcaattccatctagtggaccaaaatgggcaggctattcaatatgaacttcagtcattgggggaatccaatgcacaaatgatgatcgttgccagcccaacagaaaatggacaggtacttcgtgtaattccacctacccagacaggaatggcacaagtgattatacctcaggggcaacttgtggatgtgaatagtcctcgggatgtccctgaagagaaacccagtaacagaaacttaccaactgtaagagtggatactctagcagacaataccagcaattacattcttcatcctcaaacatccttcccattgcccaaaaagtcagtgaccggaatgctggaagaaccccttctggggcctcttcagccactttcttctaatacacctatatgggcctgccgtcttaggagctgtgagaaaattggagattcataccgtggctactgtgtaagtgagactgaattagaaagtgtcctaacatttcacaagcagcaaacacagagtgtttgggggacccgtcagtctccaagcccagccaagcctgctacacgcttgatgtggaaatcccagtatgttccatatgatggaatcccatttgttaatgcagggagtagagctgtggtaatggagtgtcagtatgggccaagaagaaaaggtttccagttaaaaaaagtcagtgagcaggaaagcaggtcttgtcagctctacaaagccacttgtccagctcggatttacattaaaaaggtacagaagtttcctgaatatagagttcctacagaccccaaaattgacaagaaaattatcagaatggagcaggagaaagcttttaacatgctaaagaagaacttggtagatgctggtggtgttcttaggtggtatgtacagttacctacacagcaagctcatcagtatcatgaattagagactccctgcctcactttgtcaccttctccttttcctgtgtcttctcttgaagaagaggaaactgcagttagagatgagaattgtgcattaccctcacgtttacatcctcaagtagcacataagattcaagaattagtatcacagggaatagaacaagtgtatgcagtaaggaaacagctaagaaaatttgtggaaagggaactgttcaaacccgatgaggtacctgaaagacataatttatctttttttccaactgtaaatgatataaaaaatcacatccatgaggtacagaaatccttgagaaatggagatacggtatataactcagagattattccagcaacgcttcaatggactacagacagtgggaatattctcaaagagaccatgacagttacatttgcagaaggaaattcaccaggagaatcaattaccaccaaagtggaaacaaatcagaccaggggttctttgtctcctgagccaacccacttgctctcctcactctcctcatttcagcccaaaatatttacacaactacagggtttgcagttacaaccaaggtacacctctcctgatgaatcaccagctgtggtatcagtaaataaccagccgtcctctagtccttcaggacttctggatacaataggaagtgctgtaatgaataataattctctactgcttggtcaaagtcatagccttcaaagagatacatgcttaacccaaaacaatagtactgcctccaccatgggtaaccttccagaaccagatcaaaatctagttgcaatggacgagctggtagaagttggagatgttgaggatacagggaatctggaaggaactgttcatcggattctgttgggagatgtgcagactattccaatacagattatagacaaccactcagctcttattgaagaaaatccagaaagtaccatttctgtgagccaagttaaacaagaacccaaagaaccagcattgtctatggaagcaaaaaactgtggactataagaaattatctgctacataaattattgaagcttttcagaatttacaactctggtgacttctgatgtcttagaaaggaaggtgaatatagtcaaagcgtggcattgagataattggactgaagaccagtttgatgagaagcttttatttaaaactgatatatttgttgccagttccatatttttaccttccttaagagatgttttactcttcttattttgtataatttttatgctctttgattatctaataaggccagtatttcaaaagctgttctgaatttatccacagtaatatagtctgaacacaaatagtttacttaacttatccttggaaatattcaattttggttattacaaaacagaaaagaacaacagcaacaaaaacattgtgtgaatatatgtttgtatgtgtgtatgtatatcatgaattttttttttaagttctgaaaaagaacttgttctctccttaaagttgtgaagaaattgttaattgccagacaggtaagaaaatgtttataatctatctcattaagaaagatgaagtattagattttacatcataacacaaagtccagcagctacatc

SEQ ID NO: 135 - DNA, 379 bp, Homo sapiens
  modified_base (11)..(11): a, c, t or g
  modified_base (13)..(13): a, c, t or g
  modified_base (360)..(360): a, c, t or g
ttaatagcagntntgtatattcttagcctcctcagaaaggcacagcatacataattcaaacagcaaatctgtggtggccatcagaactttggcagggttacgtaacatttgtcaaacaatgtggacttctagccatttcatacatttttaagatctggtcatatacattgggggtaaaaatgtacacacacacacacgcgcacacacacacatttttaaccaataaaacatatatgctatctagagcccatttactctatggtcaggctttgggcttcttggggtgatccaaactgtggggcaaaggctaaattagggtatacttatatatcccttaattttgggcttggggaaggtttnaccccaccaaagggacccc

SEQ ID NO: 136 - DNA, 392 bp, Homo sapiens
  modified_base (341)..(341): a, c, t or g
  modified_base (369)..(369): a, c, t or g
  modified_base (387)..(387): a, c, t or g
aattattttcttgacttttggctataagattttgtgtaatttttgaatttggtgttttctagaatttttaaaagccactttgatttagttttaaatatgtttaaaaatagcgattaaaattatgtaagcaaggagcctgttagtttatagatcatgccttcaaacctctagagttaatttgggtgacttttttaaaaataaggaatgttaatggggtttgaagctttttattaaaccttgttaatttaggagacatttttaatcgtgtttctcacctcatgctggaaggggtgactcctttaacatgccacccaaaggattttttttaaacacttgggtcntttttgtggggttaacctttcctaaggncccaattaatggggtatntaagg

SEQ ID NO: 137 - DNA, 1953 bp, Homo sapiens
ctgcggtcactgctgaggttttcagaactttccaggcaaaggccagccaggtcctttgcctccaacccactccgcgcctacctcccgcctggggacacccctaggcccaggagatcctactctcccccgagcaccgacgttccaactcgtctgcgcccccgactgctgtccggctcctgtgccaaggggcgcgcgcatcttcccggggccagcaacgctcccaacttctcgactcgccctcctcctccccagagcgagagtggggcgggctgagcccggatccggggtgcactcgagcgttcccagcgctcggcattcaccccgcctcagagccgactttcgaagggggattgagcctcggaggtccaggcgtcttactccaaagctcaagtcggcccccgtcttttctttccacacccctgtgcccgtcgcatgctggccgggtgagcggccgggccgaggattcgggtgcccggggccgcgtcgccccgtcgggtactgagctgagcgcaccatggccggctgctgctgcctgtccgcggaggagaaggagtcgcagcgcatcagcgcggagatcgagcgacagcttcgtcgggacaagaaggacgcgcgccgtgagcttaagctgctgctgctgggaactggtgaaagtgggaaaagcacctttatcaagcagatgagaattatccatgggtctggttacagcgacgaagacagaaaggggttcacgaagctggtttaccaaaacatattcaccgccatgcaagccatgatcagagcgatggacacgctaaggatacagtatgtgtgtgaacagaataaggaaaatgcccagataatcagagaagtggaagtggacaaggtctccatgctctccagggagcaggtggaggccatcaagcagctctggcaagatccaggcatccaggagtgttacgacaggaggagggagtaccagctgtcggactctgccaaatattacctgactgacattgaccgcatcgccacaccatcattcgtgcctacccaacaagatgtgcttcgcgtccgagtgcccaccaccggcatcattgagtatccatttgacttggaaaacatcatctttcggatggtggatgttggtggccaacgatcggaaagacggaagtggattcactgctttgagagtgtcacctccattattttcttggttgctctgagtgaatatgaccaggtcctggctgagtgtgacaacgagaatcgcatggaagagagcaaagccttatttaaaaccatcatcacctacccctggtttctgaattcgtctgtgattttattcttgaacaagaaggatcttttggaagagaaaatcatgtactctcatctaattagctatttcccagaatacacaggaccgaaacaggatgtcagagctgccagagactttatcctgaagctttaccaagatcagaatcctgacaaagagaaagtcatctactctcacttcacatgtgctacagatacagacaatattcgctttgtgtttgctgctgtcaaagacacaattctacagctaaacctaagggaattcaaccttgtctaaaagctgctgcccactcctcccctataacagaagatgtgatttgcaaactccttgttttatttgcaagtgcttctgacatcaccagagccagccccatgccaggaactaaggatgtcatgtagatcgtggggacagagatgggtgatggaacttggaagatatttgagtttaccaacatactttaaaagtccttacatcccaaattgtgtttataattattttcttgacttttggctataagattttgtgtaatttttgaatttggtgttttctagaatttttaaaagccactttgatttagttttaaatatgtttaaaaatagcgattaaaattatgtaagcaaggaaaaaaaaaaaaaaaaaaaaaaaaa

SEQ ID NO: 138 - DNA, 314 bp, Homo sapiens
tttttttaccttcggtttaggtcctttattacaaggaaaacataaaaaatctttcaatcagtaagagcacataagtcttaatgatctagtacattttttagtactttgacttactagggtgattcaaagtttcaggaaaaagaaaattcccagtatcattttcttaatcttattaaacccaaacataagaatgccaaaaaatacagagctcacattttgctggcatacatttccaaatttttaatgcctccctgacaggtgaattttaaggataaaaaaagcagacactttcaaaacattccttgtgatgaagt

SEQ ID NO: 139 - DNA, 1909 bp, Homo sapiens
gcagatggtgctgtcgaccagtgtcaagaccaagtttcatgggttcctggacgctcagccaggggtagtctctgaagggccgcctggcaattgggagcagaagccagtttcccgccatctgctctccgtggaggcagtgctctcgcggctgctgcccgttggggtccagctgaggaaggagcgcggatcccaggctcgttctttgcctgggctgcccctgcggcccctggggcgggtgctgctgcggcgccagctccaagggcggatccaggcgggaggggcctcctcggagaagcggggcgcggtcccaactacgcagaggctggcacgccgaccctccacacctcaccacgcccccatctccgtccgtgtacacacactcacacaaggacgccaaccccacctagatgcaaagcaggattcaaaagaacatctttgcgttttctaccggctccccatcatcgtactagggaggaagaagcgggtgagaaacaaaacttctttccattgtcctgcccgtttctgcggacttgttctgaggccgaggagcctgtgttggaagagatggtgatgggcctgggcgttttgttgttggtcttcgtgctgggtctgggtctgaccccaccgaccctggctcaggataactccaggcacctctaagatactgatggctctgcagaggacccattcattgcttctgcttttgctgctgaccctgctggggctggggctggtccagccctcctatggccaggatggcatgtaccagcgattcctgcggcaacacgtgcaccctgaggagacaggtggcagtgatcgctactgcaacttgatgatgcaaagacggaagatgactttgtatcactgcaagcgcttcaacaccttcatccatgaagatatctggaacattcgtagtatctgcagcaccaccaatatccaatgcaagaacggcaagatgaactgccatgagggtgtagtgaaggtcacagattgcagggacacaggaagttccagggcacccaactgcagatatcgggccatagcgagcactagacgtgttgtcattgcctgtgagggtaacccacaggtgcctgtgcactttgacggttagatgccaccatgtagggattatcgcgagtggttgaccttacacttactccttaaatagcagtgagtaatgcatttgagctgtcccaggctctgtctcctcagctcatttcctactctttttctctatataactcattctattaaatacattgcaccaaagagatatggagacataaacctgtaatgaatgaggctgggcttttctgtaataagcttccttttataatactggtcagcttagctctctcagatcctatcctgtggaatttagttattatgtgtatttatgtagtatttcaaacatttcaaaatgctttcatctatgtttatcacattttaataccacagcacttataatgatgtcactacatatagaagctcaaagttaagggatttgctgaagactgtaaagttaatggaagaattgagacaaaaatccagtgtagctggccacttatccagggctttttctacttcatcacaaggaatgttttgaaagtgtctgctttttttatccttaaaattcacctgtcagggaggcattaaaaatttggaaatgtatgccagcaaaatgtgagctctgtattttttggcattcttatgtttgggtttaataagattaagaaaatgatactgggaattttctttttcctgaaactttgaatcaccctagtaagtcaaagtactaaaaaatgtactagatcattaagacttatgtgctcttactgattgaaagattttttatgttttccttgtaataaaggacctaaaccgaaggtacctgaaaaaaaaaaaaaaa

SEQ ID NO: 140 - DNA, 334 bp, Homo sapiens
ttttttagttataattactttattaaccttttggtctttcaacatttagatagtctttcttaatatttccaggagagtacctcatttttattttgaaaaccattcagcacatttatcttatgtaacatgcagagcatatatctatctgtatttttaaaattttcctgttactcattgatacatagtacttaattacatgttattccatgtacactgaaaacaatataggaaatatatacatctaagacttctactttgtacagtctttcattaaataagaatacttacacatacattttcagatatttctaccttcctgtatgtgtttggaatt

SEQ ID NO: 141 - DNA, 1172 bp, Homo sapiens
gagacattcctcaattgcttagacatattctgagcctacagcagaggaacctccagtctcagcaccatgaatcaaactgcgattctgatttgctgccttatctttctgactctaagtggcattcaaggagtacctctctctagaaccgtacgctgtacctgcatcagcattagtaatcaacctgttaatccaaggtctttagaaaaacttgaaattattcctgcaagccaattttgtccacgtgttgagatcattgctacaatgaaaaagaagggtgagaagagatgtctgaatccagaatcgaaggccatcaagaatttactgaaagcagttagcaaggaaatgtctaaaagatctccttaaaaccagaggggagcaaaatcgatgcagtgcttccaaggatggaccacacagaggctgcctctcccatcacttccctacatggagtatatgtcaagccataattgttcttagtttgcagttacactaaaaggtgaccaatgatggtcaccaaatcagctgctactactcctgtaggaaggttaatgttcatcatcctaagctattcagtaataactctaccctggcactataatgtaagctctactgaggtgctatgttcttagtggatgttctgaccctgcttcaaatatttccctcacctttcccatcttccaagggtactaaggaatctttctgctttggggtttatcagaattctcagaatctcaaataactaaaaggtatgcaatcaaatctgctttttaaagaatgctctttacttcatggacttccactgccatcctcccaaggggcccaaattctttcagtggctacctacatacaattccaaacacatacaggaaggtagaaatatctgaaaatgtatgtgtaagtattcttatttaatgaaagactgtacaaagtataagtcttagatgtatatatttcctatattgttttcagtgtacatggaataacatgtaattaagtactatgtatcaatgagtaacaggaaaattttaaaaatacagatagatatatgctctgcatgttacataagataaatgtgctgaatggttttcaaataaaaatgaggtactctcctggaaatattaagaaagactatctaaatgttgaaagatcaaaaggttaataaagtaattataact

SEQ ID NO: 142 - DNA, 356 bp, Homo sapiens
tttgagaaatagggttttttattatatattcatttttccatatttctggaaaatgaaacagacatggagtatttcaaagctgggagagatcattatattggagttaccttagaaagagggggctgtttctgccaccacaacaaagaatgaaacaacacaaatatttacgttttcttcttgtcctcataatgcttttactgcactcgtctttcaacctttaacatctactgcatctgtgactgttgtttcagtaaaacacggaagcttgaatgtaagctcatttcattgcctgctgcacaacacacaaaacagcattttcttattcttgaaatatgatagcaacgtctccttccatg

SEQ ID NO: 143 - DNA, 463 bp, Homo sapiens
  modified_base (101)..(101): a, c, t or g
  modified_base (161)..(161): a, c, t or g
  modified_base (287)..(287): a, c, t or g
  modified_base (386)..(386): a, c, t or g
  modified_base (432)..(432): a, c, t or g
  modified_base (450)..(450): a, c, t or g
  modified_base (457)..(457): a, c, t or g
atgggagaatatattatttatttaaatggaaacactaatctttattttcatcatgctgaagtgtgtggttacaatttccaataaaacactatatataatangcaaaataagttagtacattgtaaacttatgcacagtttcatcaattaacagtttaagancaaacaagccatttaagactttggagctacatttaggtaaaaaattgcaaacactcaaatcttatcaaccccaagtaaggacagtaaagaggctattcaaggacttcttcaaaccaattacacaantacatgtttatttttgggttacaggtcccctggctatggcacaaggaccattgggggatggctgggggacaatttacacatttttaaaacgggccaaanggccaaagcccgggggggttaacctggcccgggcctttgggggggnggctcggttctttggaangtggccnaacctt

SEQ ID NO: 144 - DNA, 391 bp, Homo sapiens
  modified_base (51)..(51): a, c, t or g
gccctgcattcgctccgccgcaccgccttccgtatcaaaacctaaatagangttgttgttaccgtgtgccaatgtgtcccatgtgggttgtgccaggtagagaaacaggaagtcaatcatctgtgacagtctctattctgtcgttttgctccttggtatttgatttgcactatatttagttgaagcctgttcactgtttaaaaccggagtatcttcaaaggcatggagacctggttccagtaaatgtcccaccagtggggtatagaaagcatgctcatgaccctgccgtgtcgtctgaggtacccgttcttatcctagtggttcaggaagagaaaacgcagtttggcacttttcaagacagcttcttttaaggctgggcatgttattctcc

SEQ ID NO: 145 - DNA, 3436 bp, Homo sapiens
atttttaaaaccacgaaatggcagggtacttcatgctgcgtttttaaggagaaagaaaaatctcttcttatggatgtcctgtaaggaaaacaaaaattaaagatgatgtaaaaggtggagccatcttcccgagtatcggatttgtgtttgcttttctgttggcaacaagccttgtgtaccaggatattaacgaataattaagatcctgtccagaagaggagggattttaaagataattgtgtgtgagctatcaggaaataactgttccaggtatagggttcaactttgtgaggagacaagaaaacaagtcagactgtcacagctaatttagggaaagcaaaatggaagtctgaaggctatcaagtaagccagagtgtggtgttaataaagagcctttgggaggcagaagcttgaatgtgatagaagtcagggtgggaaggtgagtcaggaccagcatagggaagtaggatggccttccagctagtgagtggaggtgtgtatatgtgtgtgtgtgtgtgtgtgtgtgtgccacacagacatgtgctattcagtagattagaaaggttaactcattggaagagttttgaagctcatttcagcaactgagataagaaggactactctgtgaagactcaatactcagaaatgtgatttcttagaaattgatccttgaaggaaccgacaggagttaagagagggaaacgcgtttccttttgttttcttttttgatgtccaattttgagaaggagcacagagtgcagcatcatgacaaggagatttctcgaagccgaattccccggttgattcttcggccccatatgccccaacaacagcacaaagtgtccccagcctctgagtctcctttctctgaggaagagagcagagagttcaaccccagcagctctgggcgctcagcgaggaccgttagcagcaacagcttctgctcagatgacacaggctgtcctagcagccagtcagtgtctcctgtgaagacaccctcagatgctggaaacagccccattggcttttgccctggaagtgatgaaggcttcaccagaaagaaatgcacgattggaatggttggtgaaggaagcattcagtcctctcgatataagaaggaatcaaagtcaggccttgtgaaaccaggtagtgaagctgattttagctcctcgagcagcacaggcagcatttccgctcctgaggtccatatgtcgactgcgggaagcaagcggtcttcttcttcacgcaatcgaggtcctcatgggcggagtaatggagcttcgtcacacaagcctggcagcagcccatcatccccgcgggaaaaggaccttctgtccatgctgtgcaggaatcagctgagccctgtcaatatccatcccagttatgcaccttcttccccaagcagtagcaactcaggctcctacaaaggaagcgactgtagccccatcatgaggcgttctggaaggtacatgtcttgcggtgaaaatcatggtgtcagacccccaaacccagagcagtatttgactccactgcagcagaaagaggtgacagtgagacacctcaaaaccaagctgaaggaatctgagcgccgactccatgaaagggaaagtgaaatcgtggagcttaagtcccagctggcccgcatgcgagaggactggattgaggaggagtgtcaccgggtagaggcccagttggcactcaaagaagccaggaaagagattaaacagctcaaacaggtcatcgaaaccatgcggagcagcttggctgataaagataaaggcattcagaaatattttgtggacataaacatccaaaacaagaagctggagtctctccttcagagcatggagatggcacacagtggctctctgagggacgaactgtgcctagactttccatgtgattccccagagaagagcttaaccctcaacccccctcttgacacaatggcagatgggttatctctggaagagcaggtcacgggggaaggggctgacagggagctactggtaggagatagcatagccaacagcacagatttgttcgatgagatagtgacagccaccaccacagaatctggtgacctggagcttgtgcattccacccctggggctaacgtcctggagctgctgcccatagtcatgggtcaggaggagggcagtgtggtggtggagcgagccgttcagaccgacgtggtgccctacagcccagccatctcagagctcattcagagtgtgctgcagaagctccaggacccctgtccctcgagcttggcgtcccctgatgagtctgaaccagactcgatggagagcttcccagagtccctctctgccttagtggttgatttaactccaagaaatccaaactcagccatccttttgtctcccgtggagaccccctacgccaatgtggatgcagaagttcatgcaaaccgcctcatgagagagctggattttgcagcctgcgtggaagagaggttggatggtgtcatcccactggctcgcgggggcgtcgtgaggcagtactggagcagcagcttcctggtggatctcctggctgtggctgcccccgtggtccccacggttctgtgggcattcagtactcagagagggggaacggatcctgtgtataacatcggggccttgctcaggggctgttgcgtggttgccctgcattcgctccgccgcaccgccttccgtatcaaaacctaaatagaagttgttgttaccgtgtgccaatgtgtcccatgtgggttgtgccaggtagagaaacaggaagtcaatcatctgtgacagtctctattctgtcgttttgctccttggtatttgatttgcactatatttagttgaagcctgttcactgtttaaaaccggaggtatcttcaaaggcatggagacctggttccagtaaatgtcccaccagtggggtatagaaagcatgctcatgaccctgccgtgtcgtctgaggtacccgttcttatcctagtggttcaggaagagaaaacgcagtttgcactttcaagacagcttctctaaggctggcatgttatctccttgctttgctttttgccgttttaaaatgtgtaattgttccagcattccaatggtcttgtgcatagcaggggactgtaaccaaaaataaacatgtatttgtgtaattggtttgaagaagtcttgaatagctctttactgtcttacttggggttgataagatttgagtgtttgcaattttttactaaatgtagctccaaagtcttaaatggcttgtttgttcttaaactgttaattgatgaaactgtgcataagtttacaatgtactaacttattttgcttattatatatagtgttttattggaaattgtaaccacacacttcagcatgatgaaaataaagattagtgtttccatttaaataaatgttttatcctcccacaaaaa

SEQ ID NO: 146 - DNA, 1430 bp, Homo sapiens
  modified_base (7)..(7): a, c, t or g
  modified_base (837)..(837): a, c, t or g
  modified_base (915)..(915): a, c, t or g
  modified_base (931)..(931): a, c, t or g
  modified_base (943)..(943): a, c, t or g
  modified_base (957)..(957): a, c, t or g
  modified_base (967)..(967): a, c, t or g
  modified_base (969)..(969): a, c, t or g
  modified_base (979)..(979): a, c, t or g
  modified_base (982)..(982): a, c, t or g
  modified_base (989)..(989): a, c, t or g
  modified_base (992)..(992): a, c, t or g
  modified_base (1014)..(1014): a, c, t or g
  modified_base (1016)..(1016): a, c, t or g
  modified_base (1019)..(1021): a, c, t or g
  modified_base (1044)..(1044): a, c, t or g
  modified_base (1059)..(1059): a, c, t or g
  modified_base (1064)..(1064): a, c, t or g
  modified_base (1066)..(1066): a, c, t or g
  modified_base (1093)..(1093): a, c, t or g
  modified_base (1097)..(1097): a, c, t or g
  modified_base (1099)..(1099): a, c, t or g
  modified_base (1103)..(1103): a, c, t or g
  modified_base (1115)..(1115): a, c, t or g
  modified_base (1126)..(1126): a, c, t or g
  modified_base (1135)..(1136): a, c, t or g
  modified_base (1140)..(1140): a, c, t or g
  modified_base (1146)..(1146): a, c, t or g
  modified_base (1150)..(1150): a, c, t or g
  modified_base (1156)..(1156): a, c, t or g
  modified_base (1166)..(1167): a, c, t or g
  modified_base (1174)..(1174): a, c, t or g
  modified_base (1176)..(1176): a, c, t or g
  modified_base (1178)..(1178): a, c, t or g
  modified_base (1188)..(1188): a, c, t or g
  modified_base (1194)..(1195): a, c, t or g
  modified_base (1197)..(1199): a, c, t or g
  modified_base (1207)..(1207): a, c, t or g
  modified_base (1209)..(1209): a, c, t or g
  modified_base (1213)..(1217): a, c, t or g
  modified_base (1223)..(1223): a, c, t or g
  modified_base (1229)..(1229): a, c, t or g
  modified_base (1232)..(1233): a, c, t or g
  modified_base (1237)..(1237): a, c, t or g
  modified_base (1246)..(1246): a, c, t or g
  modified_base (1248)..(1248): a, c, t or g
  modified_base (1257)..(1258): a, c, t or g
  modified_base (1266)..(1268): a, c, t or g
  modified_base (1271)..(1272): a, c, t or g
  modified_base (1274)..(1274): a, c, t or g
  modified_base (1277)..(1277): a, c, t or g
  modified_base (1281)..(1281): a, c, t or g
  modified_base (1289)..(1289): a, c, t or g
  modified_base (1291)..(1291): a, c, t or g
  modified_base (1293)..(1294): a, c, t or g
  modified_base (1297)..(1298): a, c, t or g
  modified_base (1300)..(1301): a, c, t or g
  modified_base (1304)..(1304): a, c, t or g
  modified_base (1308)..(1308): a, c, t or g
  modified_base (1310)..(1311): a, c, t or g
  modified_base (1320)..(1320): a, c, t or g
  modified_base (1322)..(1324): a, c, t or g
  modified_base (1326)..(1331): a, c, t or g
  modified_base (1335)..(1336): a, c, t or g
  modified_base (1338)..(1338): a, c, t or g
  modified_base (1344)..(1344): a, c, t or g
  modified_base (1347)..(1349): a, c, t or g
  modified_base (1352)..(1365): a, c, t or g
  modified_base (1367)..(1372): a, c, t or g
  modified_base (1374)..(1419): a, c, t or g
  modified_base (1421)..(1425): a, c, t or g
cagattngaatttaatacgactcacttatagggaatttgggccctcgcaggccaagaattcggcactagggcgggagctggaggccgagcgggcccagctgcagagtcagctgcagcgtgagcaggaggagctgctggcccggcggaaggctgagaaggaacagctgagtgaggagattgctgccctgcagcaggagcatgacgagggcctcctcctggccgagagcgagaagcagcaggccttgtctctgaaggagtctgagaagatggcgctgtcagagaagttgatgggtacacggcacagcctggccaccatctccctggagatggagcggcagaaaccagatgcccagagccggcaggagcaggaccgggtaggcctgccgtcgtagggaggcttgcggagcaggagcgccctctctccaccgagctatcccgcggtttccagcatcccatctggcggactcctcttcctctctcttctcctactctgggtcttctatcctggtgttccttgaatgcctatcttccttttgtgcctcggaacctctcacgcctgccacaagttactcttttccttggtagttctgaactttaaataaggtaatgcctgtaagaatgccataaatgctcaataattgtcatctgttattattttcatcagtaacatcatctgaatcatcagtattgtctgcttttaacagctgcatttttcattgtccaaatatagtcacatacatttgaccattttataattattgaataataaattcgttctgctattttacaatgaaaaataatgctgcagagagcatttttgcacatgtatcgtggcanatgtaggccagaggctcttcttttatccatcctatggccaacctatgaatgtatacacgtttaatgagattttgccancaatcaaagccttcanggaaaatgtccntagctctttactanatcaaatcangnactctggatnatnggaatanctnaaaaaaaaatttatcccctgcncnccnnnttgtctttgtcttttcacgtttnaataaaaggctggtnaaaanantttaaaaaaaaaaaaaaaaaattcttngggncnaaanttttcctttttnggggttttttnccttgcccnncccntttttnaaantttggntggaaaaccnnggtttcncntnatcccctttnaagggnntnnncgaaaacncnatgnnnnntttttnggtttnacnnaaanccccttttngngttttgggnngaaaaaannnccnngnggngggngggggggnanannccnntnnggngggngnngggggaaanannngnnnnnngggnnancccccnggnnntgnnnnnnnnnnnnnntnnnnnnannnnnnnnnnnnnnnnnnnnnnnnnnnnnnnnnnnnnnnnnnnnnnannnnntaaat

SEQ ID NO: 147 - DNA, 6642 bp, Homo sapiens
gcgtgctgactgagctagtcttggggtcctggagaagggggctggaggcatgcccacagcctcccccccatgagcttggggctggcgggggcacaggaggtggagctgacactagagacggttatccagacactggagagcagcgtcctgtgccaggagaaaggcttgggcgcgcgggacctggcccaggacgctcagatcaccagcctgcctgcccttatcagggagattgtcacccgcaacctctcccagcctgagagcccagtcctgctgccggccacggagatggcatcgctgctgtcgctgcaggaggagaaccagctgctgcagcaggagctgtcccgcgtggaggacctgctggcccagagccgtgccgagcgcgatgagctcgccattaagtacaatgcggtcagcgagaggctggagcaggctctgcggctggagcctggggagctggagacgcaggagcccagggggctggtacggcagagcgtggagttgcggaggcagctgcaggaggagcaggcctcctaccggcgcaagctgcaggcctaccaggagggccagcagcggcaggcccagcttgtgcagcggctgcagggcaagattctccagtacaagaagaggtgctcggagctggagcagcagctgctggagagatccggagagctggagcagcagcggctgagggacacagagcacagccaagacctggaaagcgccctcatccggctggaggaggagcagcagaggagtgccagcctggcccaggtgaatgccatgctccgagaacagctggaccaggcaggctcggccaaccaggctctgagtgaggacatacgaaaggtgaccaatgactggacacgctgccgcaaggagctggagcaccgggaggcggcgtggaggcgcgaggaggagtccttcaacgcctacttcagcaacgagcacagtcgcctgctcctcctctggaggcaggtggtggggttccggcggctggtcagcgaggtgaagatgttcactgagagggacctgctgcagctgggaggggagctggcccggacatcacgagctgtccaggaggcgggcctgggactgagcacgggcctacggctggcagagagccgggccgaggcagccctggagaaacaggccctgctgcaggcccagctggaggagcagctgcgggacaaggtgctccgcgagaaggacctggcgcagcagcagatgcaaagcgacctggacaaggctgacctcagtgccagagtgacagagctgggcctggcagtgaagcgtcttgagaagcagaatctggagaaggatcaggtcaacaaggacctcactgagaagcttgaggccctggaatccctgcggctacaggagcaggcggccctggagacagaggatggagaggggctacagcagaccctaagggacctggcacaggccgtcttgtcagactctgagagcggcgtccagctgagcggctctgagcgcaccgcggatgcttccaacggcagcctgcgggggctctcgggccagcggaccccgtccccaccgcggcgctcctcgcccggccgaggccgttcaccccgccgaggcccctccccggcctgctcagactcctccacgctcgccctgatccactccgccctgcacaagcgccagctgcaggtccaggacatgcgtgggcgctatgaggcaagccaggacctactgggcaccctgcggaagcagcttagcgacagcgagagcgagcggcgggccctagaggaacagctgcagcgcctgcgggacaagaccgacggcgccatgcaggcccacgaggacgcccagcgcgaggtgcagcggctgcggagcgccaacgagctcctgagcagggagaagagcaacctggcccacagcctgcaggtggcccagcagcaggccgaggagctgcggcaggagcgggagaagctgcaggctgcccaggaggagctgcggcgccagcgggaccggctggaggaagagcaggaggacgcagtgcaggatggcgcgcgggtgcgccgggagcttgagcgcagccatagacaactagagcagctggaagggaagcgctcagtcctggccaaggagctggtggaggtgagggaggcgctgagccgcgccacactgcaacgggacatgctgcaggccgagaaggccgaggtggccgaggcgctgaccaaggctgaggctggccgcgtggagctcgagctctccatgaccaagctgagggcagaggaggcctccctgcaggactccctgtccaagctgagcgccctcaacgagagccttgctcaggacaagttggatctgaaccgccttgtcgcccagctggaggaagaaaagtccgccctgcagggccggcaacggcaggcagagcaggaggccacagtggcgcgggaagagcaggaacggctagaggagctgcggttggagcaggaggtggcgcggcagggcctggagggctccctacgagtggcggagcaggcccaggaggcattggagcagcagctccccacgctgcgccatgagcgcagccagctgcaggagcagctagcgcagctctcccggcagctgagcgggcgggagcaggagctggagcaggcccggcgggaggcccagcggcaagtggaggcgctggagcgagcggcccgtgagaaggaggcgctagccaaggagcacgctggcctggctgtgcagctggtggctgcggagcgtgaaggcaggaccctgtcagaggaggccacacgcctgcgcttggagaaggaagccctggagggcagcctgtttgaggtgcaacggcagctggcccagcttgaggcccgccgggagcagctggaagccgaggggcaggccctgctgctggccaaggagaccctgactggggagttggcgggcctgcggcagcaaataatagctacacaggagaaagccagtctagacaaggagctgatggcccagaagctggtgcaggctgagcgggaggcccaggcctctctgcgggagcagcgggcagctcacgaggaggacttacagcgactccagcgtgaaaaggaggcagcatggcgggagctggaggccgagcgggcccagctgcagagtcagctgcagcgtgagcaggaggagctgctggcccggctggaggctgagaaggaagagctgagtgaggagattgctgccctgcagcaggagcgcgacgagggcctcctcctagcagagagtgagaagcagcaggccttgtctctgaaggagtctgagaagacggcgctgtcagagaagttgatgggtacacggcacagcctggccaccatctccctggagatggagcggcagaaacgagatgcccagagccggcaggagcaggaccggagcaccgtgaacgctctgacgtctgagctgcgggacctacgggcccagcgggaggaggctgctgcggcccacgcccaggaggtgaggaggctgcaagagcaggcccgagacctgggcaagcagcgggactcctgtcttcgcgaggcagaagagcttcggacccagctgcgtctgctggaggatgcccgtgacgggctgcggcgggagctgctggaggcccagcgcaagctgcgtgagagccaggagggccgggaggtgcagcgccaggaggcaggcgagctgcgacgcagcctgggcgagggtgccaaggagcgcgaggccctgcggcgttccaatgaggagcttcggtctgctgtgaagaaggcagagagcgagcgcatcagcctgaagcttgccaatgaggacaaggagcagaagctggcactcctagaggaggcacggacagctgtgggcaaggaggccggggagctgcgaactgggctgcaggaggtggagcgctcacggctggaggctcggcgggagctgcaggagctccggcgtcagatgaagatgctggacagtgagaacaccagactgggccgggagctggcggagctgcagggccgcctggcgctgggcgagcgggcagagaaggagagcaggcgggagaccctgggcctccggcagaggctgctgaagggcgaggccagcctggaggtgatgcggcaggagctccaggtagcccagcggaagctgcaggaacaagaaggcgagttccggacccgcgagcgacgcctgctgggctccctggaggaggcgcgtggcactgaaaagcagcagctggaccacgcccgcggcctggagctgaagctggaggcggcgcgggccgaggccgcagagctgggcctgcggctgagcgcagccgagggccgggcacaaggcctggaggccgagctggcccgcgtggaggtgcagcggcgcgcggcggaggcccagctgggtggcctgcgctcggctctgcgccggggcctcggcctcggtcgcgcgcccagcccagccccgcggccagtgcccggttcccctgcccgggacgcacccgcagaaggaagcggggaagggctcaacagccccagcaccttagaatgcagccctgggtcccagccaccatctccaggacctgccacctccccagcctctccagacctggacccggaggcagtgcgcggggccctccgggaattcctgcaagagctgcggagtgcccagagagaacgggacgaacttcggacccagaccagtgccctgaatcgccagctggccgagatggaggctgagagggacagcgcaacctcgagggccaggcagctgcagaaggcggtggctgagagtgaggaagcccggcgcagtgtggatgggcggctgagcggggtccaggcggagctggcgctgcaggaggagagtgtgcggcgcagtgagcgggagcgccgggccacgctggaccaggtggccacactggagaggagcctgcaggccaccgagagcgagctccgggccagccaggagaagatcagcaagatgaaggccaatgagacaaagctggagggcgacaagcggcgcctgaaggaggttctggacgcctccgagagccgcactgtcaagctggagctgcagcggcgctcgcttgagggggagctgcagcgcagccgcctgggcctcagtgaccgcgaggcccaagcccaggccctccaggatcgggtggattccctgcagagacaggtggccgacagcgaggtgaaggcagggaccctgcagctgaccgtggagcggctgaatggggccctggccaaggtggaggaaagcgagggggccctgcgggacaaggtgcggggcctgacagaggccctggcccagagcagtgccagcctcaacagcacccgggacaagaacctgcatctgcagaaggctctgaccgcctgtgaacatgaccgccaagtactccaggaacggctggatgccgcccggcaggcattatctgaggcacggaagcagagcagctccctgggcgagcaggtgcagacgttgcgaggcgaggtggctgacctggaactgcagcgggtggaggccgagggccagctacaacagctacgggaggtgctgcggcagcggcaggagggtgaggctgcagccctgaacaccgtccagaagctgcaagacgagcggcggctgctgcaggagcgcctgggaagcctgcagcgcgccctggctcagctggaagctgagaagcgggaggtggagcgctcagccctgcggctggagaaggaccgtgtagccctcaggaggacgctggacaaggtggagcgggagaagcttcgtagccatgaggacacagtgcggctgagcgcagagaagggccgcctggaccgcaccctcacgggggctgagctggagctggcagaggcgcagaggcagatccagcagctggaggcgcaggtggtggtgctggagcagagccacagcccggcccagctggaggtggatgcgcagcagcagcagctggagctgcagcaggaggtggagcggctgcgcagcgcccaggcgcagactgagcgcaccctggaggctcgggagcgggcccaccgccagagggtgcgtgggctggaggagcaggtgtccacactgaagggccagctgcagcaggagcttcgaaggagctcagcacccttctccccaccctccggccccccagagaaatgagctcctgctggcatctggagaacacccctgtgcctgggacaggggaggacccttcttttggacagcccccccccccagagcccggtcccttgggggcctcaagctggggtgggatgaggaggcgctctgctggcagtgctgaggacgggtactccagctccaggcctggagaggcttcccagcaacacctgcagtccagcccccctcttctaggatgagccactgtagatcattaaagttcctccttgagaggctgagccgtagccaggattggggagagcccttgtctctggtcagccctggagcatgggatcgtgggaaagaggagggggaccaggcccagggcaggggtcagaggcccaggccctgacttcggcttcccagagatctctccgccttagttaagagcatgtgtcgggaaattcctcagagtgctcagagtccctgtatttttatacctttttacaatgttaactgttcagaactgttttttgtaacaaaaccttgtttttaaaaaag

SEQ ID NO: 148 - DNA, 384 bp, Homo sapiens
  modified_base (4)..(4): a, c, t or g
  modified_base (130)..(131): a, c, t or g
  modified_base (138)..(138): a, c, t or g
  modified_base (187)..(187): a, c, t or g
  modified_base (207)..(207): a, c, t or g
  modified_base (281)..(281): a, c, t or g
  modified_base (337)..(337): a, c, t or g
  modified_base (358)..(358): a, c, t or g
  modified_base (371)..(371): a, c, t or g
  modified_base (380)..(380): a, c, t or g
gcanttcggcaccgcgctgttcgtgcgctcgcagcatcgtgtcgaactgaccgaggcagggaaaacactgaaggagcaggtgccactgatcgtcgcgcagttcgatcgcgcgatcgatctcacgcgttgnngggccgngcgaagtggggcgcctggcgttcggcatcatcagttcggcgatggtcgngccgatcccgcacgcgttgnctgtttcgccgaacgccatccgcacgtgcactggtcgctgcacgagatgacgccggccgcacagatcgacgcgntgaaggagaagcggctcgacgtgtgtttcttccggcttttccagggacgatccgtngatccgcagcgagattcgttnttgcgggaaaccncgttggccntgtt

SEQ ID NO: 149 - DNA, 305 bp, Homo sapiens
  modified_base (12)..(12): a, c, t or g
  modified_base (16)..(16): a, c, t or g
  modified_base (19)..(19): a, c, t or g
  modified_base (48)..(48): a, c, t or g
  modified_base (119)..(119): a, c, t or g
  modified_base (174)..(174): a, c, t or g
  modified_base (268)..(268): a, c, t or g
ctggccgcgcgnctgncancgcgtgaagccgctgatcgacgcgatcancgctggttgcgacatcgctcgcgcactgacgcacgcgtcgcctcaaatgctgaactccgccgcgacctcgncacggtttcaagaaacgcaccgagtaccgccgacgtatcgtccgcacggtagcgngcctgcagcgagcacttccagcgccggcgcaacaacggcacgaacgtgacgccgcccgtcgaaatctgccgtgacgacgcaggcagcagcgcancccccagccctttcacgcaccagcgacagagcgtatg

SEQ ID NO: 150 - DNA, 436 bp, Homo sapiens
tttgaaaatagtcaatctagacattttattaagttctattaaaaaatattaagacatctgaaaaactcagaaagtttataaaacacactcatactcaataattttcttattctttgatagccagtgtgacatgttgaagatgttacaccaaaaccaacccaccatactgcaaaaagctgtatctcgagtttaatcaacatgcatcctaattaaggggaaatacactcttgtataagagtgtaagtttttattaagttgtttttaaaaataacttttcccttaaacttaggaagggttgatttcgctaatttacccaacaccatgataacttatgttcttttaatgatataggataaatgcagagatgcaacatgctggaacttcttaaaatatacagtatagctgggcgcagtggctcacgcctgtaatcccagca

SEQ ID NO: 151 - DNA, 5198 bp, Homo sapiens
ctcacttaaacacgtagttcccgcgaccccaacgtcccagaggcggggccggagtcggcggtggcgctccttggagccggctcccgctcctaccctgcaaacagacctcagctccgcggaagttgcgagacggggtttcaccatgttggtcgggctggtctggaaatcctgacttcaggtgatccacccgcctcggcctcccaaaatgctgggattacaagcgtgagccaccgcccctgacatgagccattgacttttaaagcaggagaataatttggatcagatttatatggaaacactcttctagcagcattatggggacttttccataagtctggatactgaggatttggaattaaagaaatcattcaccagacatcatggagcctatatatccttttgcacggccccagatgaataccaggtttccttcaagcaggatggtacctttccactttcctccatcaaaatgtgcactttggaacccaacgccaactggagatttcatctacttacatctcagttactacagaaatccaaagcttgtggtgactgagaagaccatccgacttgcttatcgtcatgctaacgagaataaaaaaaattcgtcatgctttttacttggttctctgacagcagacgaagatgaagaaggtgtaacattgacagtagatcgctttgatcctggtcgagaagtacctgaatgcctagaaataacccctactgcttctcttcctggggactttttgattccatgcaaagttcatactcaagaactttgttcaagagaaatgatagttcacagtgtagatgacttcagttcagctttaaaggctctacagtgccatatatgtagcaaagattccttggactgtggtaagctgctttccctaagagttcatatcacttccagggagagtttggacagtgtggaatttgacttgcattgggcagcagtaactctagcaaataactttaaatgcacacctgtgaagcccatccccattattccaacagctctggcaagaaacttgagcagtaatctgaatatttctcaagttcaagggacttataaatatggatatcttaccatggatgaaacacgcaaattgttacttttgttggaatctgatcccaaggtttattctctaccattggtgggaatttggctgtctggaattacacatatctatagtcctcaggtatgggcttgctgtttgcgatacatattcaattcttctgttcaagaaagggttttttcagaatctggaaatttcatcatagttctctattctatgacacataaggaacctgagttttatgaatgcttcccttgtgatggcaagatacctgactttcggtttcagttgctaaccagtaaggaaacattacatcttttcaaaaatgttgaacctcctgacaaaaatccaatccgttgtgaactgagcgctgaaagccaaaatgcagaaacagagtttttcagtaaggcttccaagaatttttcaattaagaggtcttcccaaaagttatcttctgggaagatgccaatacatgatcacgactctggtgttgaagatgaagatttttctccaagaccaattcctagtcctcatccagtgagtcagaagatttctaagatccaaccatcagttcctgaactttcacttgtgttggatggcaatttcatagaatcaaaccctctgcctactccattggaaatggtgaataatgaaaatcctcctttgattaaccacttggaacacttgaagccattgcaaccccagctttatgatgagaaacacagtccagaagttgaagctggagagccttccttgagaggaataccaaatcagttaaaccaggataaaccagctcttttgagacactgcaaagtaagacagccacctgcctataagaaagggaacccccataccaggaacagtattaaaccatcttctcataatgggccatctcatgatatatttgaaaagctccaaacagtttctgctggaaatgtacaaaacgaagagtatcctataagaccctccacacttaattctaggcagtcttctcttgccccgcagtcccaaccacacgattttgttttttcaccccataattcaggaagaccaatggaacttcagatacctactcccccactgccatcttactgttccacaaacgtttgcaggtgttgtcagcatcatagtcatattcaatatagtccgctaaattcttggcaaggagcaaacacagttggatccattcaagatgtccagtctgaagcccttcaaaagcattcattatttcacccaagtggatgtccagccctgtactgtaatgcattctgttcttcaagtagtcctatagccttgagacctcagggagatatgggcagttgttctccccacagcaatattgaaccatcgcctgtggcaagaccgccttcacatatggacttatgtaacccacagccttgcacagtgtgcatgcacacacccaagactgagtcagataatggaatgatgggactatctccagatgcatatcggttcctcacagaacaagacagacagctaagactacttcaggcacagattcagcgtttgttggaagcacagtctctgatgccctgttcccctaagacaactgctgttgaagacacagtgcaagctggaagacaaatggagttggtttctgtggaagcacagtcttcccctggcttgcacatgagaaaaggtgtaagcattgctgtgagcacaggtgctagcttgttttggaatgcagcaggtgaggatcaagagcctgactctcaaatgaagcaagatgataccaaaatttccagtgaggacatgaatttttctgtcgatattaataatgaagtcacaagtcttccaggtagtgcatcttcattaaaagcagttgatattcccagttttgaagagagcaacattgctgtggaagaagaatttaaccagccactttctgtatccaactcttctctagttgtgagaaaagaacctgatgtacctgtgttctttccaagtggccagctggcagaaagtgtaagcatgtgtttacagactggaccaacagggggtgccagtaacaattctgaaacatcagaggaaccaaaaattgagcatgtaatgcaacccttgcttcatcaaccatcagataaccagaaaatttaccaggatttattgggtcaagtaaaccacctattaaatagttcctccaaggaaactgagcagccgtctaccaaagcagtaattatcagtcatgaatgcaccagaacccaaaacgtttaccatacaaagaaaaaaacacatcattcaagactggtggacaaagattgtgtccttaatgcaactcttaagcaactaagaagccttggagtaaaaattgattctcccactaaagtgaagaaaaatgcacataacgtggatcacgccagtgtgttggcatgcatcagcccagaagcagtgatctctggattaaactgcatgtcatttgctaatgttggcatgagcggcttaagccccaatggtgtggatttgagcatggaggcaaatgctatagctctgaaatatttaaatgaaaatcagctgtcacaactgtctgtcactcgatcgaaccaaaataattgtgacccattcagccttctccatattaatacagacagaagcacagtggggcttagtttaatttcaccaaacaacatgtcatttgcaaccaaaaaatatatgaagagatatggactcctacaaagcagtgacaatagtgaagatgaagaggaacctcccgacaatgcagatagcaagagtgaatatttattgaatcagaaccttaggtccatacccgaacagcttggtggtcagaaagagccttctaagaatgaccatgaaataattaattgttctaactgtgaatctgtggggaccaacgcagatacgccagtattgagaaatattacaaatgaagttttgcagacaaaagcaaaacagcagttgactgaaaagccagctttcttagtaaagaaccttaaaccaagtcctgcagtgaaccttcgaaccgggaaagcagagttcactcaacatcctgagaaagaaaatgaaggggacattacaatttttcctgaaagtttgcaaccttctgaaacgctaaagcagatgaatagcatgaattcagtaggcaccttcttagatgtaaaacgtctcagacagttaccaaaattattttaaccttttaactccctgcccttttaatacagggacagggtgtctcctgaagatacttagggaaaacaggagcctaccacaaggctcctgatcattctggagtcactgtttcttggtagcagccaattgggaagagtgacttctgtgagatggctggctggtgataggactaagttctcattgttcaaatagagctgttcaacatcactgaaacctttaagaaaagccctgagatcagttattcctacaagtttaagtagtagacagatactatccagctctaagtctcaactgctcttttatactgtacttttttttttgagacggagttttgctcttgtagcccaggctggagtgcaatggcaggatctcagatcactgcaacctctgcctcctgggttcaagcgattttcctgcttcatcttcccaggtagctgggattacaggcatgtgccacaacgcctggctaattttgtatttttagtagagactggtttctccatgttggtcaggctggtctcaaactcccgacctcaggtgatccgcccgcctcggcctcctaaagtgctgggattacaggcgtgagccactgcccagctatactgtatatttaagaaggtccagcatgttgcatctctgcattatcctatatcataaaagaagcataagttatcatggtgttgggtaaattagcgaaatcaaccgcttcctaagtttaagggaaaagttatttttaaaaacaacttaataaaaacttacactcttatacaagagtgtatttccccttaattaggatgcatgttgattaaactcgagatacagctttttgcagtatggtgggttggttttggtgtaacatcttcaacatgtcacactggctatcaaagaataagaaaattattgagtatgagtgtgttttataaactttctgagtttttcagatgtcttaatattttt

SEQ ID NO: 152 - DNA, 408 bp, Homo sapiens
  modified_base (52)..(52): a, c, t or g
  modified_base (369)..(369): a, c, t or g
  modified_base (394)..(394): a, c, t or g
tggaattcgaggagcccttctgggccctgagtgcaacagcctacagtttgtntgggaggacgaagcggagagccacaccctcacctacccacctgagctctggtaccgcaagatctgcggctttgatgtcctctacccgcctgagcgctacggccatgtgctgagcggctggatctgcggggaggaggccctcgtcatggagaagtgtgatgacgaggcagtggccagatctgcacggagatgctgcgtcagttcacagggaaccccaacattccaaaacctcggcgaatcttgcgctcggcctggggcagcaacccttacttccgcggctcctattcatacacgcaggtggggctccagcggggcggnatgtggagaagctgggccaagcccntgccgttacaagga

SEQ ID NO: 153 - DNA, 2291 bp, Homo sapiens
ctttctgtgctgatcttggaggcagagtggctgcctgcattcattccacggtccattccacagcttgttccaaagacagtctgctcatgatgtagcttctgcacttgacaaattattttcatgcacgaggcccttgaaaatgttgacagtcttgtgacatccatggagggccttatttgacggtcacaaaggagcggttcctagaaggtgagcgcggacggtatgcaaagttgtgaatccagtggtgacagtgcggatgaccctctcagtcgcggcctacggagaaggggacagcctcgtgtggtggtgatcggcgccggcttggctggcctggctgcagccaaagcacttcttgagcagggtttcacggatgtcactgtgcttgaggcttccagccacatcggaggccgtgtgcagagtgtgaaacttggacacgccacctttgagctgggagccacctggatccatggctcccatgggaaccctatctatcatctagcagaagccaacggcctcctggaagagacaaccgatggggaacgcagcgtgggccgcatcagcctctattccaagaatggcgtggcctgctaccttaccaaccacggccgcaggatccccaaggacgtggttgaggaattcagcgatttatacaacgaggtctataacttgacccaggagttcttccggcacgataaaccagtcaatgctgaaagtcaaaatagcgtgggggtgttcacccgagaggaggtgcgtaaccgcatcaggaatgaccctgacgacccagaggctaccaagcgcctgaagctcgccatgatccagcagtacctgaaggtggagagctgtgagagcagctcacacagcatggacgaggtgtccctgagcgccttcggggagtggaccgagatccccggcgctcaccacatcatcccctcgggcttcatgcgggttgtggagctgctggcggagggcatccctgcccacgtcatccagctagggaaacctgtccgctgcattcactgggaccaggcctcagcccgccccagaggccctgagattgagccccggggtgagggcgaccacaatcacgacactggggagggtggccagggtggagaggagccccgggggggcaggtgggatgaggatgagcagtggtcggtggtggtggagtgcgaggactgtgagctgatcccggcggaccatgtgattgtgaccgtgtcgctaggtgtgctaaagaggcagtacaccagtttcttccggccaggcctgcccacagagaaggtggctgccatccaccgcctgggcattggcaccaccgacaagatctttctggaattcgaggagcccttctggggccctgagtgcaacagcctacagtttgtgtgggaggacgaagcagagagccacaccctcacctacccacctgagctctggtaccgcaagatctgcggctttgatgtcctctacccgcctgagcgctacggccatgtgctgagcggctggatctgcggggaggaggccctcgtcatggagaagtgtgatgacgaggcagtggccgagatctgcacggagatgctgcgtcagttcacagggaaccccaacattccaaaacctcggcgaatcttgcgctcggcctggggcagcaacccttacttccgcggctcctattcatacacgcaggtgggctccagcggggcggatgtggagaagctggccaagcccctgccgtacacagagagctcaaagacagcgcccatgcaggtgctgttttccggtgaggccacccaccgcaagtactattccaccacccacggtgctctgctgtccggccagcgtgaggctgcccgcctcattgagatgtaccgagacctcttccagcaggggacctgagggctgtcctcgctgctgagaagagccactaactcgtgacctccagcctgccccttgctgccgtgtgctcctgccttcctgatcctctgtagaaaggatttttatcttctgtagagctagccgccctgactgccttcagacctggccctgtagcttttctttttctccaggctgggccgtgagcaggtgggccgttgagttacctctgtgctggatcccgtgcccccacttgcctaccctctgtcctgccttgttattgtaagtgccttcaatactttgcattttgggataataaaaaaggctccctcccctgccaaaaaaaaaaaaaaaaaaaaaaaaaaaaaaaaaaaaaaaaaaaaaaaaaaaaaaaaaaaaaaaaaacaaaaaaaaaaaaaaaaagc

SEQ ID NO: 154 - DNA, 439 bp, Homo sapiens
  modified_base (84)..(84): a, c, t or g
  modified_base (418)..(418): a, c, t or g
  modified_base (428)..(428): a, c, t or g
gatgttaatgtgaattactttgagatatgatggaaaaatattacaggtacacatggaaaagacatgatcaccaagtgaaaacantctaaccagaaagctttaacatctgtcagttaagctgaagctgaaattctgggagcatgacatgctgcagggccaaaaggaatggataattagtattcctctccttcttcctcaccctctccttcaacagaatccacaccaacctcctcataatccttctcaagggcagccatatcttcacgggcctctgaaaactcgccttcctccatcccctcacccacgtaccagtgaacaaaggcacgcttgggcatacatcagggtcaaacttgtgggtccagggggagcccaggggcttcagcaatggctgtgggtgttgctcagcatggcacacagntttttgtaancttgggccagg

SEQ ID NO: 155 - DNA, 477 bp, Homo sapiens
  modified_base (83)..(83): a, c, t or g
  modified_base (86)..(86): a, c, t or g
  modified_base (429)..(429): a, c, t or g
  modified_base (440)..(440): a, c, t or g
gtggcttgctgcctgttgtaccgtggtgacgtggttcccaaagatgtcaatgctgccattgccaccatcaaaaccaagcgcanatnccagtttgtggattggtgccccactggcttcaaggttggcatcaactaccagcctcccactgtggtgcctggtggagacctggccaaggtacagagagctgtgtgcatgctgagcaacaccacagccattgctgaggcctgggctcgcctgggaccacaagtttgacctgatgtatgccaagcgtgcctttgttcactggtacgtgggtgaggggatggaggaaggcgagttttcagaggcccgtgaagatatggctgcccttgagaaggattatgaggaggttggtgtggattcttgttgaaggagagggtgaggaagaaggagaggattattattattccntccttttgccntgcagcatgtcatgctcccagaatttcagcttcagtt

SEQ ID NO: 156 - DNA, 1771 bp, Homo sapiens
ggcggccaggccgggcgcggagtgggcgcgcggggccggaggaggggccagcgaccgcggcaccgcctgtgcccgcccgcccctccgcagccgctacttaagaggctccagcgccggccccgccctagtgcgttacttacctcgactcttagcttgtcggggacggtaaccgggacccggtgtctgctcctgtcgccttcgcctcctaatccctagccactatgcgtgagtgcatctccatccacgttggccaggctggtgtccagattggcaatgcctgctgggagctctactgcctggaacacggcatccagcccgatggccagatgccaagtgacaagaccattgggggaggagatgactccttcaacaccttcttcagtgagacgggcgctggcaagcacgtgccccgggctgtgtttgtagacttggaacccacagtcattgatgaagttcgcactggcacctaccgccagctcttccaccctgagcagctcatcacaggcaaggaagatgctgccaataactatgcccgagggcactacaccattggcaaggagatcattgaccttgtgttggaccgaattcgcaagctggctgaccagtgcaccggtcttcagggcttcttggttttccacagctttggtgggggaactggttctgggttcacctccctgctcatggaacgtctctcagttgattatggcaagaagtccaagctggagttctccatttacccagcaccccaggtttccacagctgtagttgagccctacaactccatcctcaccacccacaccaccctggagcactctgattgtgccttcatggtagacaatgaggccatctatgacatctgtcgtagaaacctcgatatcgagcgcccaacctacactaaccttaaccgccttattagccagattgtgtcctccatcactgcttccctgagatttgatggagccctgaatgttgacctgacagaattccagaccaacctggtgccctacccccgcatccacttccctctggccacatatgcccctgtcatctctgctgagaaagcctaccatgaacagctttctgtagcagagatcaccaatgcttgctttgagccagccaaccagatggtgaaatgtgaccctcgccatggtaaatacatggcttgctgcctgttgtaccgtggtgacgtggttcccaaagatgtcaatgctgccattgccaccatcaaaaccaagcgcagcatccagtttgtggattggtgccccactggcttcaaggttggcatcaactaccagcctcccactgtggtgcctggtggagacctggccaaggtacagagagctgtgtgcatgctgagcaacaccacagccattgctgaggcctgggctcgcctggaccacaagtttgacctgatgtatgccaagcgtgcctttgttcactggtacgtgggtgaggggatggaggaaggcgagttttcagaggcccgtgaagatatggctgcccttgagaaggattatgaggaggttggtgtggattctgttgaaggagagggtgaggaagaaggagaggaatactaattatccattccttttggccctgcagcatgtcatgctcccagaatttcagcttcagcttaactgacagacgttaaagctttctggttagattgttttcacttggtgatcatgtcttttccatgtgtacctgtaatatttttccatcatatctcaaagtaaagtcattaacatcaaaaaaaaaaaaaaaaaaaaaa

SEQ ID NO: 157 - DNA, 383 bp, Homo sapiens
  modified_base (4)..(5): a, c, t or g
  modified_base (9)..(11): a, c, t or g
  modified_base (377)..(377): a, c, t or g
tttnncaannntgaactttttattggcctcctgctccccaaagggtaccctgcttctgctggcttaatgcctcagaactttggtgtcattggtctcagacaccactttgccatccactatccggcgggtggtggtcttttggatggtttgcatggagttgctgctgtccaaggcatcaccaagattaaagtcctcgccatcttccagcaggcggcggtaggtggcgatctcagcctccagcttgaccttgatgttcagcagggcctcatactcctggggcctgggcgctgtccctctgcccgggtctgtgccagctctgactcaagggtgcagcaggatcccgttgaggctgctccatctgtaggggcgtagggggncctcca

SEQ ID NO: 158 - DNA, 498 bp, Homo sapiens
  modified_base (54)..(54): a, c, t or g
  modified_base (349)..(349): a, c, t or g
  modified_base (367)..(367): a, c, t or g
  modified_base (432)..(432): a, c, t or g
tgaggacctgagggctcagatcttcgcaaatactgtggacaatgcccgcatcgnttctgcagattgacaatgcccgtcttgctgctgatgactttagagtcaagtatgagacagagctggccatgcgccagtctgtggagaacgacatccatgggctccgcaagtcattgatgacaccaatatcacacgactgcagctggagacagagatcgaggctctcaaggaggagctgctcttcatgaagaagaaccacgaagaggaagtaaaaggcctacaagcccagattgccagctctgggttgaccgtgggaggtaggatgcccccaaattttcagggaccttcgccaagnttcatgggcagacatccngggcccaattattgacgagctggcttcggaagaaccgagagggagcttaggacaagttattggtnttcagcagttttagggatgggcaccacattgttcaccacacattttgttgaggtttggagttgttt

SEQ ID NO: 159 - DNA, 1485 bp, Homo sapiens
tccggggcgggggcggggcctcactctgcgatataactcgggtcgcgcggctcgcgcaggccgccaccgtcgtccgcaaagcctgagtcctgtcctttctctctccccggacagcatgagcttcaccactcgctccaccttctccaccaactaccggtccctgggctctgtccaggcgcccagctacggcgcccggccggtcagcagcgcggccagcgtctatgcaggcgctgggggctctggttcccggatctccgtgtcccgctccaccagcttcaggggcggcatggggtccgggggcctggccaccgggatagccgggggtctggcaggaatgggaggcatccagaacgagaaggagaccatgcaaagcctgaacgaccgcctggcctcttacctggacagagtgaggagcctggagaccgagaaccggaggctggagagcaaaatccgggagcacttggagaagaagggaccccaggtcagagactggagccattacttcaagatcatcgaggacctgagggctcagatcttcgcaaatactgtggacaatgcccgcatcgttctgcagattgacaatgcccgtcttgctgctgatgactttagagtcaagtatgagacagagctggccatgcgccagtctgtggagaacgacatccatgggctccgcaaggtcattgatgacaccaatatcacacgactgcagctggagacagagatcgaggctctcaaggaggagctgctcttcatgaagaagaaccacgaagaggaagtaaaaggcctacaagcccagattgccagctctgggttgaccgtggaggtagatgcccccaaatctcaggacctcgccaagatcatggcagacatccgggcccaatatgacgagctggctcggaagaaccgagaggagctagacaagtactggtctcagcagattgaggagagcaccacagtggtcaccacacagtctgctgaggttggagctgctgagacgacgctcacagagctgagacgtacagtccagtccttggagatcgacctggactccatgagaaatctgaaggccagcttggagaacagcctgagggaggtggaggcccgctacgccctacagatggagcagctcaacgggatcctgctgcaccttgagtcagagctggcacagacccgggcagagggacagcgccaggcccaggagtatgaggccctgctgaacatcaaggtcaagctggaggctgagatcgccacctaccgccgcctgctggaagatggcgaggactttaatcttggtgatgccttggacagcagcaactccatgcaaaccatccaaaagaccaccacccgccggatagtggatggcaaagtggtgtctgagaccaatgacaccaaagttctgaggcattaagccagcagaagcagggtaccctttggggagcaggaggccaataaaaagttcagagttcaaaaaaaaaaaaaaaaaaa

SEQ ID NO: 160 - DNA, 321 bp, Homo sapiens
  modified_base (275)..(275): a, c, t or g
  modified_base (316)..(316): a, c, t or g
acacaactttattgatgaaacacaagtcttagaataacaaatataaactaatataaaagtgtagcttatgcatgatgtataaccaattcattgtcagtttaggtagaggaaagattaaaaaatctcaatctaggtaataagatcaaatcaataaattctttctgtgtacaaatactaatatttcatttggcatccttaaaatggttcatcctaaacccaaccattacaaccaacatcagtcactgttatgatatatgatagtcattattccaaantagcagctgaaaagatctctttaccatatacgcacaatganaaaca

SEQ ID NO: 161 - DNA, 473 bp, Homo sapiens
  modified_base (380)..(380): a, c, t or g
ggtcagttgtaaagtaccatcagaattgatttccctctttaataaagaatgggatagagagattcttcttaatatccttaccctatttgagaatataaatgacaacataaaaaatgaagggctcgcatcatccaggaaagaattcagcagaagttcactttttttcttattcaaagagtctggagtttgtgttaagaaaatcaaagcactagcaaatcacaatgatctggtggtgaaagtaaaagtcctgaaagtattaaccaaactctaatttggagtctgtcccaaacaatattgagatatttgcagttggtacgatgtgatttgtaaattctttgtttttcattgtggcgtatatggtaaagagatctttttcagcnggctattttgggaataatggactatcatattttcataacagtgactgatgttgggtgtaatgggtggggttagggtgaaccttttaagggtgc

SEQ ID NO: 162 - DNA, 2141 bp, Homo sapiens
gccgacgcgtgcagacgtccttctaatcctagtcttcgtttggtccggttgcactcttcctatagcccagagggcgagagggcctgtggcctgggggaaggaggacgaggttctgcctggatcccagcagtaggacgctgtgccatttgggaacaaaggaatagtctgcctggaatccctgcagatcttggggccggaggccagtccaacccttggagcaggaagaaacgcaaagttgtcaagaaccaagtcgagctgcctcagagccggcccgcagtagctgcagactccgcccgcgacgtgtgcgcgcttctctgggccagagcgagcctgttttgtgctcgggttaagagatttgtcccagctataccatgggccgcactcgggaagctggctgcgtggccgctggtgtggttatcggggctggtgcctgctactgtgtatacagactggcttggggaagagacgagaacgagaaaatctgggacgaagacgaggagtctacggacacctcagagattggggttgagactgtgaaaggagctaaaactaacgctggggcagggtctggggccaaacttcagggtgattcagaggtcaagcctgaggtgagtttgggactcgaggattgtccgggtgtaaaagagaaggcccattcaggatcccacagcggaggtggcctagaggccaaggccaaggcccttttcaacacgctgaaggaacaggcaagtgcaaaggcaggcaaaggggctagggtgggtaccatctctgggaacaggacccttgcaccgagtttaccctgcccaggaggcaggggtggaggctgccaccccaccaggagtggatctagggccgggggcagggcaagtggaaaatccaagggaaaggcccgaagtaagagcaccagggctccagctacaacatggcctgtccggagaggcaagttcaactttccttataaaattgatgatattctgagtgctcccgacctccaaaaggtcctcaacatcctggagcgaacaaatgatccttttattcaagaagtagccttggtcactctgggtaacaatgcagcatattcatttaaccagaatgccatacgtgaattgggtggtgtcccaattattgcaaaactgataaaaacaaaagaccccataattagggaaaagacttacaatgcccttaataacttgagtgtgaacgcagaaaatcagggcaagattaagacgtacatcagtcaagtgtgtgatgacaccatggtctgtcgcttggactcagctgtgcagatggctgggctaagactgttaaccaacatgactgtgactaatcattaccaacatttgctttcctattcttttccagacttttttgctttgttattcctgggaaatcacttcaccaagatacagattatgaaactaattataaactttactgaaaatccagccatgacaagagagctggtcagttgtaaagtaccatcagaattgatttccctctttaataaagaatgggatagagagattcttcttaatatccttaccctatttgagaatataaatgacaacataaaaaatgaagggctcgcatcatccaggaaagaattcagcagaagttcactttttttcttattcaaagagtctggagtttgtgttaagaaaatcaaagcactagcaaatcacaatgatctggtggtgaaagtaaaagtcctgaaagtattaaccaaactctaatttggagtctgtcccaaacaatattgagatatttgcagttggtacgatgtgatttgtaaattctttgtttttcattgtgcgtatatggtaaagagatcttttcagctgctattttggaataatgactatcatatatcataacagtgactgatgttggttgtaatggttgggtttaggatgaaccattttaaggatgccaaatgaaatattagtatttgtacacagaaagaatttattgatttgatcttattacctagattgagattttttaatctttcctctacctaaactgacaatgaattggttatacatcatgcataagctacacttttatattagtttatatttgttattctaagacttgtgtttcatcaataaagttgtgttttaagcagcagaaaaaaaaaa

SEQ ID NO: 163 - DNA, 639 bp, Homo sapiens
  modified_base (608)..(608): a, c, t or g
ttttttttttcagagaaaagaggtttattgggcttcatcgagggtgcagatgcctccgtgtggggctctggtcggcagctggctttcagagcctttccctgccttctggggccctgtgatccctcatgcctacttctttctctcttggtcagccttgtgcgcatgccctctcactcttcatctcttgggcctgtctctgtttctccttggatgttcttctattattcccctctctccatcctccataaataaataatttaattttttttgccttcataaatagtcccctccctgcctctagtcatcccccaagctcctccatgtgcctgctcttcctctgtgtgtggatctaggccccacctagctggtgggacagaccaacagctttgggctgggaattcctaggcaggcttgaaatcctcagccagacagacatcagggatggttcagggaggtgtggtcccctggatgcctagaattccttctttgaaagctccggtgacttgatcaggggagacttgagctgttggaatggcaaagagaggtggtgacgaccctgcaatggtcagaatggaggcagaaatggggagaaggcttgaaatcattanttttctttctggattttccaagtctacagag

SEQ ID NO: 164 - DNA, 1386 bp, Homo sapiens
gccccatctccttgggctgcccgtgcttcgtgctttggactaccgcccagcagtgtcctgccctctgcctgggcctcggtccctcctgcacctgctgcctggatccccggcctgcctgggcctgggccttggttctccccatgacaccacctgaacgtctcttcctcccaagggtgtgtggcaccaccctacacctcctccttctggggctgctgctggttctgctgcctggggcccaggggctccctggtgttggcctcacaccttcagctgcccagactgcccgtcagcaccccaagatgcatcttgcccacagcaccctcaaacctgctgctcacctcattggagaccccagcaagcagaactcactgctctggagagcaaacacggaccgtgccttcctccaggatggtttctccttgagcaacaattctctcctggtccccaccagtggcatctacttcgtctactcccaggtggtcttctctgggaaagcctactctcccaaggccacctcctccccactctacctggcccatgaggtccagctcttctcctcccagtaccccttccatgtgcctctcctcagctcccagaagatggtgtatccagggctgcaggaaccctggctgcactcgatgtaccacggggctgcgttccagctcacccagggagaccagctatccacccacacagatggcatcccccacctagtcctcagccctagtactgtcttctttggagccttcgctctgtagaacttggaaaaatccagaaagaaaaaataattgatttcaagaccttctccccattctgcctccattctgaccatttcaggggtcgtcaccacctctcctttggccattccaacagctcaagtcttccctgatcaagtcaccggagctttcaaagaaggaattctaggcatcccaggggaccacacctccctgaaccatccctgatgtctgtctggctgaggatttcaagcctgcctaggaattcccagcccaaagctgttggtctgtcccaccagctaggtggggcctagatccacacacagaggaagagcaggcacatggaggagcttgggggatgactagaggcagggaggggactatttatgaaggcaaaaaaattaaattatttatttatggaggatggagagaggggaataatagaagaacatccaaggagaaacagagacaggcccaagagatgaagagtgagagggcatgcgcacaaggctgaccaagagagaaagaagtaggcatgagggatcacagggccccagaaggcagggaaaggctctgaaagccagctgccgaccagagccccacacggaggcatctgcaccctcgatgaagcccaataaacctcttttctctg

SEQ ID NO: 165 - DNA, 421 bp, Homo sapiens
  modified_base (249)..(249): a, c, t or g
  modified_base (411)..(411): a, c, t or g
tgttggagtcataggcaaatgtttaattaattctgctcatatgcacatctgaaagcatgagacacactccacagacagcacacactggagctggtggggcagatgggcactcgccaattaggtattaatgtcaataatacgtgcataaagtgctgataaaataacttaagtgttacaaaaacagacagtccacggtggctgcaggcacatgcaggcgggactgggtcagacactccagggctgcacatnttccagctggcctgagtccgacacgtcatagctggccttgtacttggccagggattttcatgaggggccgtagcttgagccaccactgttctttggggaatcctgtgcttcaaaatccgtttgcttcttcagctttgccacaggtttgaaaaataacgtttntttgcttatt

SEQ ID NO: 166 - DNA, 331 bp, Homo sapiens
  modified_base (134)..(134): a, c, t or g
  modified_base (161)..(161): a, c, t or g
  modified_base (163)..(163): a, c, t or g
  modified_base (247)..(247): a, c, t or g
  modified_base (278)..(278): a, c, t or g
  modified_base (314)..(314): a, c, t or g
gcgacttgccatcaagctgccggatgatcagatcccaaagaccaattgcaacgtagctgtcatcaacgtgggggcacccgcggctgggatgaacgcggccgtacgctcagctgtgcgcgtgggcattgcgacgnccacaggatgctcgccatctatgatgntnttgacggcttcgcaagggccagatcaaagaaatcggctggacagatgtcgggggctgggaccggccaaggaggctccattcttngggacaaaacgcgttcttcccggggaagtantttggaaggagattcgccacacagattgcggcacgnacagctttcaacgcgtt

SEQ ID NO: 167 - DNA, 2628 bp, Homo sapiens
gcacccggacgtgcggctcccctcggcctcctcgccatggacgcggacgactcccgggcccccaagggctccttgcggaagttcctggagcacctctccggggccggcaaggccatcggcgtgctgaccagcggcggggatgctcaaggtatgaacgctgccgtccgtgccgtggtgcgcatgggtatctacgtgggggccaaggtgtacttcatctacgagggctaccagggcatggtggacggaggctcaaacatcgcagaggccgactgggagagtgtctccagcatcctgcaagtgggcgggacgatcattggcagtgcgcggtgccaggccttccgcacgcgggaaggccgcctgaaggctgcttgcaacctgctgcagcgcggcatcaccaacctgtgtgtgatcggcggggacgggagcctcaccggggccaacctcttccggaaggagtggagtgggctgctggaggagctggccaggaacggccagatcgataaggaggccgtgcagaagtacgcctacctcaacgtggtgggcatggtgggctccatcgacaatgatttctgcggcaccgacatgaccatcggcacggactccgccctgcacaggatcatcgaggtcgtcgacgccatcatgaccacggcccagagccaccagaggaccttcgttctggaggtgatgggacgacactgtgggtacctggccctggtgagtgccttggcctgcggtgcggactgggtgttccttccagaatctccaccagaggaaggctgggaggagcagatgtgtgtcaaactctcggagaaccgtgcccggaaaaaaaggctgaatattattattgtggctgaaggagcaattgatacccaaaataaacccatcacctctgagaaaatcaaagagcttgtcgtcacgcagctgggctatgacacacgtgtgaccatcctcgggcacgtgcagagaggagggaccccttcggcattcgacaggatcttggccagccgcatgggagtggaggcagtcatcgccttgctagaggccaccccggacaccccagcttgcgtcgtgtcactgaacgggaaccacgccgtgcgcctgccgctgatggagtgcgtgcagatgactcaggatgtgcagaaggcgatggacgagaggagatttcaagatgcggttcgactccgagggaggagctttgcgggcaacctgaacacctacaagcgacttgccatcaagctgccggatgatcagatcccaaagaccaattgcaacgtagctgtcatcaacgtgggggcacccgcggctgggatgaacgcagccgtacgctcagctgtgcgcgtgggcattgccgacggccacaggatgctcgccatctatgatggctttgacggcttcgccaagggccagatcaaagaaatcggctggacagatgtcgggggctggaccggccaaggaggctccattcttgggacaaaacgcgttctcccggggaagtacttggaagagatcgccacacagatgcgcacgcacagcatcaacgcgctgctgatcatcggtggattcgaggcctacctgggactcctggagctgtcagccgcccgggagaagcacgaggagttctgtgtccccatggtcatggttcccgctactgtgtccaacaatgtgccgggttccgatttcagcatcggggcagacaccgccctgaacactatcaccgacacctgcgaccgcatcaagcagtccgccagcggaaccaagcggcgcgtgttcatcatcgagaccatgggcggctactgtggctacctggccaacatgggggggctcgcggccggagctgatgccgcatacattttcgaagagcccttcgacatcagggatctgcagtccaacgtggagcacctgacggagaaaatgaagaccaccatccagagaggccttgtgctcagaaatgagagctgcagtgaaaactacaccaccgacttcatttaccagctgtattcagaagagggcaaaggcgtgtttgactgcaggaagaacgtgctgggtcacatgcagcagggtggggcaccctctccatttgatagaaactttggaaccaaaatctctgccagagctatggagtggatcactgcaaaactcaaggaggcccggggcagaggaaaaaaatttaccaccgatgattccatttgtgtgctgggaataagcaaaagaaacgttatttttcaacctgtggcagagctgaagaagcaaacggattttgagcacaggattcccaaagaacagtggtggctcaagctacggcccctcatgaaaatcctggccaagtacaaggccagctatgacgtgtcggactcaggccagctggaacatgtgcagccctggagtgtctgacccagtcccgcctgcatgtgcctgcagccaccgtggactgtctgtttttgtaacacttaagttattttatcagcactttatgcacgtattattgacattaatacctaatcggcgagtgcccatctgccccacctgctccagtgcgtgctgtctgtggagtgtgtctcatgctttcagatgtgcatatgagcagaattaattaaacatttgcctatgactccaacaaaaaaaaaaaaa

SEQ ID NO: 168 - DNA, 320 bp, Homo sapiens
  modified_base (132)..(132): a, c, t or g
  modified_base (215)..(215): a, c, t or g
  modified_base (224)..(224): a, c, t or g
  modified_base (251)..(251): a, c, t or g
  modified_base (253)..(253): a, c, t or g
  modified_base (286)..(286): a, c, t or g
  modified_base (290)..(290): a, c, t or g
  modified_base (294)..(294): a, c, t or g
ccggctgtacaatttattcagtgcacattatttacagaaataaatgtatgggggtggacacggaacccccgcagccccaccccttagctggctctccggttctgcagggggcagaagctgccggacccgcanttggtccagtgcacaagaaaccactcgcagaggccagcagaatccttccccctcaagtgccttggggatcctgggtggcagantccactcgntcagggccatggggaagtagagccagntntacagtaccatttcccacagcagccacggcctnttgnttgntttgggaaggaaaagaggaaggaggc

SEQ ID NO: 169 - DNA, 373 bp, Homo sapiens
  modified_base (21)..(21): a, c, t or g
  modified_base (282)..(282): a, c, t or g
  modified_base (307)..(307): a, c, t or g
  modified_base (333)..(333): a, c, t or g
  modified_base (340)..(340): a, c, t or g
  modified_base (353)..(353): a, c, t or g
  modified_base (369)..(369): a, c, t or g
ggctcccacctccccttgggnccacaccttctcccctctccccagggaagcagcagcctcgcccctggcagagatgcctccctgagctagaaccctctgttccttccctgtgcctcctccctccctctccgactcacaccactagcctcaggggtctgagctccagctcctttgggcttcagctggccagtgtcctgagccccagggagagggggctggtgggtgcctaggcctggggcagtgggatgggccgtgaatgggtgcccacagtgttaggcactngggcatgagggggtttcttcccttncagttccctgttgcccccagggttcntgggganggaggagacaatngttgggggataagggncaag

SEQ ID NO: 170 - DNA, 4456 bp, Homo sapiens
acgactctttgatccctcccctaagacctccttcccgtccgcctaggcctcggtatcccccaccaggtatgagaaggaggagtcttcattcttcccaggcggggagaccacgccttccctgcctcctccctccgcggggggtcgcgttggaggtcacccccgccccctaggcgctgggttgggagtgacgcggggtgggctggagaggtttcctgccgtctgggaagcgtaaacggaccgcccacctgtcgggcctcggccgcccgcacctgcttgtgagaagcctgcggctggggcaccgcccccggtccccgcccgggtccgcgcattgggagcacactggccctttaagagcgcggcggccgcggcgcgcggggaggagggctgggagcgcccggagccgcgctgaactcgccggggacgtcgggcgcccgctccttggctggctcgcttgctctctcgctcgctctctcgggtcggctccctgcgcctcctcccgggactgcttggggacccgggcccggtcgggcgcggcggcgagcagaatccccgtgcaggaggcgcgcgctccgggcagcgcccggccccgggcatggacagagggagctgggcgcgcagggagcgccgcgggaccgggcggccggagcgctgagccagacaaaggctccggagttgcgcttgctctcgggagccgggccccaggcgctgggcgccgaggctgcggaacctcgccgggggcagctccggtcggccccctttcccgccggctggttccgagctcccggacctgccctgcccgcttctcctcgggcttgggaatttgccgaggcgacctaggcggctccggcggggaccgggagcccgaggtccgcggcgcgcctgccgggccaggagccagggagcgtcgcaagtttccaaggcgcgtgcgaggatccggcgtgcagtgttccgagctgggctgggcgccgagagcatgggcagcgacccgagcgcgcccggacggccgggctggacgggcagcctcctcggcgaccgggaggaggcggcgcggccgcgactgctgccgctgctcctggtgcttctgggctgcctgggccttggcgtagcggccgaagacgcggaggtccatgccgagaactggctgcggctttatggctacctgcctcagcccagccgccatatgtccaccatgcgttccgcccagatcttggcctcggcccttgcagagatgcagcgcttctacgggatcccagtcaccggtgtgctcgacgaagagaccaaggagtggatgaagcggccccgctgtggggtgccagaccagttcggggtacgagtgaaagccaacctgcggcggcgtcggaagcgctacgccctcaccgggaggaagtggaacaaccaccatctgacctttagcatccagaactacacggagaagttgggctggtaccactcgatggaggcggtgcgcagggccttccgcgtgtgggagcaggccacgcccctggtcttccaggaggtgccctatgaggacatccggctgcggcgacagaaggaggccgacatcatggtactctttgcctctggcttccacggcgacagctcgccgtttgatggcaccggtggctttctggcccacgcctatttccctggccccggcctaggcggggacacccattttgacgcagatgagccctggaccttctccagcactgacctgcatggaaacaacctcttcctggtggcagtgcatgagctgggccacgcgctggggctggagcactccagcaaccccaatgccatcatggcgccgttctaccagtggaaggacgttgacaacttcaagctgcccgaggacgatctccgtggcatccagcagctctacggtaccccagacggtcagccacagcctacccagcctctccccactgtgacgccacggcggccaggccggcctgaccaccggccgccccggcctccccagccaccacccccaggtgggaagccagagcggcccccaaagccgggccccccagtccagccccgagccacagagcggcccgaccagtatggccccaacatctgcgacggggactttgacacagtggccatgcttcgcggggagatgttcgtgttcaagggccgctggttctggcgagtccggcacaaccgcgtcctggacaactatcccatgcccatcgggcacttctggcgtggtctgcccggtgacatcagtgctgcctacgagcgccaagacggtcgttttgtctttttcaaaggtgaccgctactggctctttcgagaagcgaacctggagcccggctacccacagccgctgaccagctatggcctgggcatcccctatgaccgcattgacacggccatctggtgggagcccacaggccacaccttcttcttccaagaggacaggtactggcgcttcaacgaggagacacagcgtggagaccctgggtaccccaagcccatcagtgtctggcaggggatccctgcctcccctaaaggggccttcctgagcaatgacgcagcctacacctacttctacaagggcaccaaatactggaaattcgacaatgagcgcctgcggatggagcccggctaccccaagtccatcctgcgggacttcatgggctgccaggagcacgtggagccaggcccccgatggcccgacgtggcccggccgcccttcaacccccacgggggtgcagagcccggggcggacagcgcagagggcgacgtgggggatggggatggggactttggggccggggtcaacaaggacgggggcagccgcgtggtggtgcagatggaggaggtggcacggacggtgaacgtggtgatggtgctggtgccactgctgctgctgctctgcgtcctgggcctcacctacgcgctggtgcagatgcagcgcaagggtgcgccacgtgtcctgctttactgcaagcgctcgctgcaggagtgggtctgaccacccagcgctcctgctaacggtgctcagggggcgcctgtggttctgagatggctcccaggggctccctccgcccccaggtaggggcccctctcagccctcacacaccctgtctgccccgccctcattatttatgtccaggtgtttgttttgttttgtttttggcaccttacttgaccatttgtttctgtttccccgactggggcagggtgtttagaattttctaaatgtagttctgctccagacagggaattaggcccccatcatcctctggcttggccacagccaggggagcagaggggcagaggcccacattggaagagcagcacctcctcagcctgaaccccagggctgtaactgccaggctctctttgcccagttggagactgtctggcccccctggtcccctccttcccaagtgagtctctctgggccttaggaagagccttccacccaggggcagccccaggccaaaggggacctggaagggaggtgggccgtggcccttgagtccccattgaggcttggttccttcccaatccagtggacttcgcagtccacttctgacagcctcagtgaccctggctccttgtgccagagaacccagcccacccccggcagcagcccccagctcccacctccccttgggcccacacctccttccctctctggagaaagggccctgggcctgcctcaccacggaccaaagggagtctgccagggcccctctccccagggaagcagcagcctcgcccctggcagagatgcctccctgagctagaaccctctgttccttccctgtgcctcctccctccctctccgactcacaccactagcctcaggggtctgagctccagctcctttgggcttcagctgccagtgtcctgagccccagggagagggggctggtgggtgcctaggcctgggcagtggatggccgtgaatgggtgcccacagtgtcaggcactgggcatgaggggttcctcccctccagctccctgtgcccccagggtcctgggaggagagacactggtggggataggccagccgcgcatcagactgtgaaccccacgaaggagcccattgtggcctaagaggctgccctcctgtgctcagccctgaggacagatgcctccttcctcttttccttcccaaagcaagcaagaggccgtggctgctgtgggaaatggtactgtacagctggctctacttccccatggccctgagcgagtggagtctgccacccaggatccccaaggcacttgagggggaaggattctgctggcctctgcgagtggtttcttgtgcactggcaccaagtgcgggtccggcagcttctgccccctgcagaaccggagagccagctaaggggtggggctgcgggggttccgtgtccacccccatacatttatttctgtaaataatgtgcactgaataaattgtacagccggcaaaaaaaaaaaaaaaaaaaaa

SEQ ID NO: 171 - DNA, 449 bp, Homo sapiens
  modified_base (166)..(166): a, c, t or g
  modified_base (271)..(271): a, c, t or g
  modified_base (380)..(380): a, c, t or g
  modified_base (430)..(430): a, c, t or g
  modified_base (443)..(443): a, c, t or g
gaacaggggaagtttaatataaagatgaactctactcggagcatagagtttaaaaagagttctacacaacaccctagggatgaggaagaatgcctcagggaagaaagcacagaaaaggaggtgccctcccgaggctgggactgagacctcctcgctggagaaggtntgggaggcccctgagggtgaagttccccgggttgctcgagccagagtctgcacagtcacagggcaagcagaaaattctttcgagagggtgggcgctcacagggantcgggaagcagagcccacctgcctacacctgaaaggccacagccagtgctggggacctcttctgaggtcttgcagactccagggcagagcactcctggggcagcttttncagcagggagcaggaagggaaacgacattgaaagccctttttttccccanttttcccattttnaacatt

SEQ ID NO: 172 - DNA, 392 bp, Homo sapiens
  modified_base (371)..(371): a, c, t or g
gatccccctcccctgcctgctctgcactcgtgggtggggcccgtgcgccgtttctccttggtagcgtgcacggtgttgaactgggacactggggagaaaggggctttcatgtcgtttccttcctgctcctgctgcacagctgccaggagtgctctgcctggagtctgcagacctcagagaggtcccagcactggctgtggcctttcaggtgtaggcaggtgggctctgcttcccgattccctgtgagcgcccaccctctgcgaaagaattttctggcttgccctgtgactgtgcagactctgggctcgagcaacccggggaacttcaccctcagggggcctcccacacctttttccagcgagggaggtctnagttcccagctttggggaagg

SEQ ID NO: 173 - DNA, 2597 bp, Homo sapiens
gagcagcgcgcgcaagcaggccaggggaaggtgggcgcaggtgaggggccgaggtgtgcgcaggactttagccggttgagaaggatcaagcaggcatttggagcacaggtgtctagaaacttttaaggggccggttcaagaaggaaaagttcccttctgctgtgaaactatttggcaagaggctggagggcccaatggctgcaaaattgcaacccaacattcccaaagccaagagtctagatggcgtcaccaatgacagaaccgcatctcaagggcagtggggccgtgcctgggaggtggactggttttcactggcgagcgtcatcttcctactgctgttcgcccccttcatcgtctactacttcatcatggcttgtgaccagtacagctgcgccctgaccggccctgtggtggacatcgtcaccggacatgctcggctctcggacatctgggccaagactccacctataacgaggaaagccgcccagctctataccttgtgggtcaccttccaggtgcttctgtacacgtctctccctgacttctgccataagtttctacccggctacgtaggaggcatccaggagggggccgtgactcctgcaggggttgtgaacaagtatcagatcaacggcctgcaagcctggctcctcacgcacctgctctggtttgcaaacgctcatctcctgtcctggttctcgcccaccatcatcttcgacaactggatcccactgctgtggtgcgccaacatccttggctatgccgtctccaccttcgccatggtcaagggctacttcttccccaccagcgccagagactgcaaattcacaggcaatttcttttacaactacatgatgggcatcgagtttaaccctcggatcgggaagtggtttgacttcaagctgttcttcaatgggcgccccgggatcgtcgcctggaccctcatcaacctgtccttcgcagcgaagcagcgggagctccacagccatgtgaccaatgccatggtcctggtcaacgtcctgcaggccatctacgtgattgacttcttctggaacgaaacctggtacctgaagaccattgacatctgccatgaccacttcgggtggtacctgggctggggcgactgtgtctggctgccttatctttacacgctgcagggtctgtacttggtgtaccaccccgtgcagctgtccaccccgcacgccgtgggcgtcctgctgctgggcctggtgggctactacatcttccgggtggccaaccaccagaaggacctgttccgccgcacggatgggcgctgcctcatctggggcaggaagcccaaggtcatcgagtgctcctacacatccgccgacgggcagaggcaccacagcaagctgctggtgtcgggcttctggggcgtggcccgccacttcaactacgtcggcgacctgatgggcagcctggcctactgcctggcctgtggcggtggccacctgctgccctacttctacatcatctacatggccatcctgctgacccaccgctgcctccgggacgagcaccgctgcgccagcaagtacggccgggactgggagcgctacaccgccgcagtgccttaccgcctgctgcctggaatcttctaagggcacgccctagggagaagccctgtggggctgtcaagagcgtgttctgccaggtccatgggggctggcatcccagctccaactcgaggagcctcagtttcctcatctgtaaactggagagagcccagcacttggcaggtgtccagtacctaatcacgctctgttccttgcttttgccttcaagggaattccgagtgtccagcactgccgtattgccagcacagacggattttctctaatcagtgtccctgggcaggaggatgacccagtcacctttactagtcctttggagacaatttacctgtattaggagcccaggccacgctacactctgcccacactggtgagcaggaggtcttcccacgccctgtcattaggctgcatttactcttgctaaataaaagtgggagtggggcgtgcgcgttatccatgtattgcctttcagctctagatccccctcccctgcctgctctgcagtcgtgggtggggcccgtgcgccgtttctccttggtagcgtgcacggtgttgaactgggacactggggagaaaggggctttcatgtcgtttccttcctgctcctgctgcacagctgccaggagtgctctgcctggagtctgcagacctcagagaggtcccagcactggctgtggctttcaggtgtaggcaggtgggctctgcttcccgattccctgtgagcgcccaccctctcgaaagaattttctgtcttgccctgtgactgtgcagactctggctcgagcaacccggggaacttcaccctcaggggcctctccacaccttctccagcgaggaggtctcagtcccagcctcgggagggcacctccttttctgtgctttcttccctgaggcattcttcctcatccctagggtgttgtgtagaactctttttaaactctatgctccgagtagagttcatctttatattaaacttcccctgttcaaaaaaaaaaaaaaaaa

SEQ ID NO: 174 - DNA, 476 bp, Homo sapiens
  modified_base (4)..(5): a, c, t or g
  modified_base (8)..(8): a, c, t or g
  modified_base (77)..(77): a, c, t or g
  modified_base (223)..(223): a, c, t or g
  modified_base (235)..(235): a, c, t or g
  modified_base (245)..(245): a, c, t or g
  modified_base (254)..(254): a, c, t or g
  modified_base (275)..(275): a, c, t or g
  modified_base (339)..(339): a, c, t or g
  modified_base (398)..(398): a, c, t or g
  modified_base (431)..(431): a, c, t or g
  modified_base (436)..(436): a, c, t or g
  modified_base (460)..(460): a, c, t or g
  modified_base (470)..(470): a, c, t or g
aaanncanctttttattgaacacattataaaacaggtttagtaaaaagaccaaagcccatgtcatcatcagactccncagattcttctttctttgcttccattttcttctcctcagctgaagcagcagcaatggagggggcaggacctcctgctggtgcagcaccagctgctagagcagggtccaccagcccctacattgcagatgaggcttccaatgttgangttggccagggnctttccaaanaagccaggncaaaaggttcaacatttacantgggctgctttaatgagggtattgatattaacctccatgatgatcacctcgtcatcgtgcagantgagggccaagtaggacacagggcaagctcggagatgggagggccatggcgccggggcnagtttgggggcttgacatttgccagaggtggtngttantcactgggatggaagttgatgggncttaccccantgtttt

SEQ ID NO: 175 - DNA, 351 bp, Homo sapiens
  modified_base (55)..(55): a, c, t or g
  modified_base (253)..(253): a, c, t or g
  modified_base (317)..(317): a, c, t or g
  modified_base (323)..(323): a, c, t or g
  modified_base (328)..(328): a, c, t or g
  modified_base (336)..(336): a, c, t or g
  modified_base (347)..(347): a, c, t or g
gatactttgccctttcctcagttgccaccaaggtgcttggtccttccgaggaagntaaggccacattggggtgaggccatcacttcatccagtgactagcaccacctctggcaatgtcagccccacactcgcccgcgccatggcctccatctccgagcttgcctgtgtctacttgggccctcattctgcacgatgacgaggtgatcatcatgggaggttaatatcaataccctcattaaaggcagccagtgtnaaatgtttgaaccttttgggctgggttttttttgggaaaggccctgggcaaaccgttcaacatngggaangcttnatcttgcnatttagggggntggg

SEQ ID NO: 176 - DNA, 269 bp, Homo sapiens
  modified_base (3)..(3): a, c, t or g
  modified_base (5)..(5): a, c, t or g
  modified_base (7)..(8): a, c, t or g
  modified_base (25)..(25): a, c, t or g
  modified_base (31)..(31): a, c, t or g
  modified_base (35)..(35): a, c, t or g
  modified_base (39)..(39): a, c, t or g
  modified_base (142)..(142): a, c, t or g
  modified_base (171)..(171): a, c, t or g
  modified_base (201)..(201): a, c, t or g
  modified_base (203)..(203): a, c, t or g
  modified_base (217)..(217): a, c, t or g
  modified_base (230)..(230): a, c, t or g
  modified_base (263)..(263): a, c, t or g
aantnannctggttgtttattgaangcaaantcantcanagaaaacggaaatgcaaccatagcatggagacgctctgagaaaagatccagacccacctcatctcccagcccttcaagcagagctataaaaacaagtttgggngaaaaacacattcccatccccaaagcagnggccccgcctgagctcccccatcctcagcntntggggtggaccggngggacgaaggggntccaaggaccagggtggccagggtgcccagagntggggc

SEQ ID NO: 177 - DNA, 3146 bp, Homo sapiens
gccgcaacccgtcccggaggtgtcctgtctcctgtcgccgccgccgccgccaccaccgctgccactgccgccctgccggggccatgttcgctctgggcttgcccttcttggtgctcttggtggcctcggtcgagagccatctgggggttctggggcccaagaacgtctcgcagaaagacgccgagtttgagcgcacctacgtggacgaggtcaacagcgagctggtcaacatctacaccttcaaccatactgtgacccgcaacaggacagagggcgtgcgtgtgtctgtgaacgtcctgaacaagcagaagggggcgccgttgctgtttgtggtccgccagaaggaggctgtggtgtccttccaggtgcccctaatcctgcgagggatgtttcagcgcaagtacctctaccaaaaagtggaacgaaccctgtgtcagccccccaccaagaatgagtcggagattcagttcttctacgtggatgtgtccaccctgtcaccagtcaacaccacataccagctccgggtcagccgcatggacgattttgtgctcaggactggggagcagttcagcttcaataccacagcagcacagccccagtacttcaagtatgagttccctgaaggcgtggactcggtaattgtcaaggtgacctccaacaaggccttcccctgctcagtcatctccattcaggatgtgctgtgtcctgtctatgacctggacaacaacgtagccttcatcggcatgtaccagacgatgaccaagaaggcggccatcaccgtacagcgcaaagacttccccagcaacagcttttatgtggtggtggtggtgaagaccgaagaccaagcctgcgggggctccctgcctttctaccccttcgcagaagatgaaccggtcgatcaagggcaccgccagaaaaccctgtcagtgctggtgtctcaagcagtcacgtctgaggcatacgtcagtgggatgctcttttgcctgggtatatttctctccttttacctgctgaccgtcctcctggcctgctgggagaactggaggcagaagaagaagaccctgctggtggccattgaccgagcctgcccagaaagcggtcaccctcgagtcctggctgattcttttcctggcagttccccttatgagggttacaactatggctcctttgagaatgtttctggatctaccgatggtctggttgacagcgctggcactggggacctctcttacggttaccaggggcacgaccagttcaagcggcgcctcccctctggccagatgcggcagctgtgcattgccatgggccgctcctttgaacctgtaggtactcggccccgagtggactccatgagctctgtggaggaggatgactacgacacattgaccgacatcgattccgacaagaatgtcattcgcaccaagcaatacctctatgtggctgacctggcacggaaggacaagcgtgttctgcggaaaaagtaccagatctacttctggaacattgccaccattgctgtcttctatgcccttcctgtggtgcagctggtgatcacctaccagacggtggtgaatgtcacagggaatcaggacatctgctactacaacttcctctgcgcccacccactgggcaatctcagcgccttcaacaacatcctcagcaacctggggtacatcctgctggggctgcttttcctgctcatcatcctgcaacgggagatcaaccacaaccgggccctgctgcgcaatgacctctgtgccctggaatgtgggatccccaaacactttgggcttttctacgccatgggcacagccctgatgatggaggggctgctcagtgcttgctatcatgtgtgccccaactataccaatttccagtttgacacatcgttcatgtacatgatcgccggactctgcatgctgaagctctaccagaagcggcacccggacatcaacgccagcgcctacagtgcctacgcctgcctggccattgtcatcttcttctctgtgctgggcgtggtctttggcaaagggaacacggcgttctggatcgtcttctccatcattcacatcatcgccaccctgctcctcagcacgcagctctattacatgggccggtggaaactggactcggggatcttccgccgcatcctccacgtgctctacacagactgcatccggcagtgcagcgggccgctctacgtggaccgcatggtgctgctggtcatgggcaacgtcatcaactggtcgctggctgcctatgggcttatcatgcgccccaatgatttcgcttcctacttgttggccattggcatctgcaacctgctcctttacttcgccttctacatcatcatgaagctccggagtggggagaggatcaagctcatccccctgctctgcatcgtttgcacctccgtggtctggggcttcgcgctcttcttcttcttccagggactcagcacctggcagaaaacccctgcagagtcgagggagcacaaccgggactgcatcctcctcgacttctttgacgaccacgacatctggcacttcctctcctccatcgccatgttcgggtccttcctggtaagcgggcctcccggcgcagcgttgaggataacgtgaaaggtagcagctgcctccttctctgtgagctgatctggcgtccacaccccaggtgttagctgacactggatgacgacctggatacttagaaaggggcttcaggaagggatgtgctgtttccctctacgtgcccagtcctagcctcgctctaggacccagggctggcttctaagtttccgtccagtcttcaggcaagttctgtgttagtcatgcacacacatacctatgaaaccttgaagtttacaaagaattgccccagctctgggcaccctggccaccctggtccttggatccccttcgtcccacctggtccaccccagatgctgaggatgggggagctcaggcggggcctctgctttggggatgggaatgtgtttttctcccaaacttgtttttatagctctgcttgaagggctgggagatgaggtgggtctggatcttttctcagagcgtctccatgctatggttgcatttccgttttctatgaatgaatttgcatacaataaccaaccagactcagtaaaa

SEQ ID NO: 178 - DNA, 314 bp, Homo sapiens
  modified_base (11)..(11): a, c, t or g
  modified_base (259)..(259): a, c, t or g
  modified_base (309)..(309): a, c, t or g
acagaaattanacctttatttgttgtactaaagcctgtttaacttttgatacaaagtaacattttagtacagaaaatcccagtctgtcagctcagtacctgtctgtgcacactgtaccatctcagtcccactctgcctgtaacttagaaaacagcccctacccccagagggtctgcgagttaataccttgaggaataggtctacagtttttcatagtttgtctgaggctaggaaaacttgtacctgtaaaacaaagggncaggcattgagggactgaaacttgtctctttttttggaccactgtgccangggaa

SEQ ID NO: 179 - DNA, 7101 bp, Homo sapiens
tctacctacagcgtcctgtccaccatgccctcagactcagaaagcagcagctccctcagcagtgtgggcactaccgggaaggcgccgtccccaccacccctcctcactgaccggcaagtgaatgagaaggtggagaacctctccattcagctgcggctgatgacccgggagagaaacgagctccgcaagcgcctggcctttgctacgcatggcacggcctttgacaagaggccctaccacaggctgaatcctgactatgagaggctgaagatccagtgcgtgcgagccatgtcggacctgcagagcctgcagaaccagcacaccaacgccttgaagaggtgtgaggaggtggccaaggagactgacttctaccacacactccacagccggctcctgagtgaccagactcggctgaaggatgacgtggacatgctgaggcgggagaatgggcagctgctgcgggagcgaaacctgctgcagcagtcatgggaggacatgaagcggctccacgaggaggaccagaaggagatcggtgacctccgtgcccagcagcagcaggtgttgaagcacaacgggtcatccgagattctcaacaaactgtatgacacggccatggacaagttggaggtggtcaagaaggactatgacgcccttcggaagaggtacagtgagaaagtcgccatccacaatgcagacctgagccgcctggagcagctgggggaggagaaccagcggttgctgaagcagacagagatgctgacccagcagagggacacggccatccagctgcagcaccagtgcgccctctccctgaggaggtttgaggcgatccaccatgagctgaacaaggccacggcgcagaacaaggacctgcagtgggagatggagctgctgcagtcagagctgaccgagctgagaaccacgcaggtgaagacagcaaaggagtcggagaaatacagggaggagcgggacgctgtgtacagcgagtacaagctcatcatgagtgagcgtgaccaggtcatctctgagctggacaagctgcagaccgaagtggagctggccgagtccaagctcaagagcagcacatctgagaagaaggcggccaatgaggagatggaggcgctgcggcagatcaaagacacggtgacaatggatgctgggagagccaacaaggaggttgaaatccttcgaaagcagtgcaaggctctgtgccaggagctgaaggaagccctccaggaggcggatgtggccaagtgccggcgggactgggccttccaggagcgagacaagattgtagcagagcgtgacagcatccggacactgtgtgacaacctgaggcgggagcgggaccgtgcggtgagcgagctggctgaggccctgcgcagcctggatgacacccgcaagcagaagaatgatgtcagccgcgagctgaaggagctcaaggaacagatggaatcccagttggaaaaggaggcccggttccgacagctgatggcccacagctcccacgactcggccattgacacggattccatggagtgggaaacggaagttgtagagttcgagagggagacggrggatattgacttgaaggcactggggtttgatatggcagaaggtgtgaatgagccttgtttcccgggggactgtggcatatttgtcactaaagtggacaaaggaagcattgctgatggccgcttaagggtcaatgactggctgctgagaatcaacgatgtggacctcatcaacaaggacaagaagcaggccatcaaggcgctcctcaatggggagggggccatcaacatggtcgtgcggcggaggaagtccctgggtgggaaggtggtcacgccgctgcacatcaacctcagtggacagaaagacagtggcatcagtctggagaatggagtgtatgctgccgctgtgctgcctggaagccctgccgctaaagaagggtcccttgctgtgggagacaggatcgttgcgatcaatggcattgcactggacaacaagtctctgaatgaatgtgaatctctgctgcggagctgccaggactccctgaccctgtccctcctgaaggtattccctcagagctcctcgtggagtggccagaacatttttgaaaatatcaaagactctgataagatgctgagttttcgagcccatggcccggaggtccaggctcataacaaacggaacttgatacagcacaataactccacgcagacagacatcttctacacggacaggctggaagacaggaaggagccaggccccccaggaggcagcagctcctttctgcataagccattccctgggggacccttgcaggtctgcccccaggcctgtcccagtgcctctgagcgtagcctgagctccttccgctcagatgcctctggggaccgtggctttgggctggtggacgtgcgtggccggcggccactgctgccctttgagaccgaggtgggcccctgtggggttggggaggcctccctggacaaggcagactctgaaggctccaacagcggcgggacctggcccaaggccatgctcagctccacggcagtgcctgagaagctctctgtttataaaaagccaaagcaaagaaagtccatctttgaccctaacactttcaaacgcccccagacaccccccaaaatagactacctgcttccaggtcctgggcctgctcactctccccagccctccaagagggcggggcctctgacacccccaaaacctcccagaaggagcgactccattaagttccagcacaggctggagactagctccgagtcagaagccactctggtgggcagctccccatccactagtcccccgagcgccctgccccctgacgtggaccccggggagcccatgcacgcatcaccccctcgcaaggccagggtccgcattgcttccagctactaccctgaaggagatggggactcctcccacctgccggccaagaaatcctgtgatgaggacctcacctcccagaaggtggatgagctggggcagaagcgtcgccggccaaaatctgctcccagttttcggccgaagcttgctccagtagtgattcctgctcagttcctggaggaacagaagtgtgtcccggccagtggagaactctccccggagctccaggagtgggcaccttactcgcctgggcattccagccggcacagcaaccccccgctataccctagcaggccgtctgtgggtactgttccccggagtttgacccccagcaccactgtgagctccatcctgcggaaccccatctacactgtgcgcagtcacagggtcggcccctgcagctctccacctgcggcccgagatgctggcccccagggtttgcatcccagtgtccagcaccagggacgcctgagcctggacctgagccacaggacctgcagcgactactccgagatgagagccacccatgggtccaactcactgccctccagcgcccgcctgggttcttcgagtaacttgcagttcaaggcggaacgcattaaaatcccatcaacaccaagatatccgcggagtgtcgtgggctccgagagaggttcagtgtcacattctgaatgcagcactcctccacagtcacccctgaacatcgacaccctgtcctcttgtagccagtcccagacctcagcctccacattgcccagaatcgctgtcaaccccgcgtccctcggggagcggagaaaggacaggccttatgtggaggagccacgccacgtgaaggtgcagaagggctcagagccgctgggcatctccatcgtgagtggagagaagggcggcatctacgtctccaaggtgaccgtggggagcatcgctcaccaggctggcctcgagtatggggatcagttactggagttcaacggcataaacctgcggagcgccacggagcagcaggcgcggctcatcatcgggcagcagtgtgataccatcaccatcctggcccagtacaacccccacgtgcaccagctcagcagccactcccggtccagctcacacctggaccctgccggtacccactccactctccagggcagtggcaccaccaccccggagcatccatctgtcatcgacccactgatggagcaggacgaggggcctagcacccccccagccaagcagagcagctccaggattgcgggagatgccaacaagaagaccctggagccacgcgttgtcttcatcaaaaagtcccagctggagcttggggtgcacttgtgtggtgggaacctgcatggggtgtttgtggccgaggtggaggatgacagtcctgccaagggtcctgacggcctcgtgccaggggacctcatcctggagtatggcagcctggacgtgcggaacaagacagtggaggaagtctatgtggagatgctgaagcccagggatggcgtccgcctgaaggtgcagtaccgccctgaggagttcacgaaggccaagggcctgcctggtgacagcttctacatcagggccctgtacgaccggctggcagatgtggagcaagagttgagctttaagaaggacgacatcctctacgtggatgacaccttaccccagggcacgttcgggtcctggatggcttggcagctggacgagaatgcccagaagatccagcgcgggcagattcccagcaaatatgtgatggaccaagaattctccaggaggctcagcatgtctgaagtcaaagatgacaatagcgccacaaagacgctgtcagcggctgcacgccggtccttttttcggaggaaacacaagcacaaacgcagcgggtccaaggacgggaaagacctgctcgccttggatgccttttccagtgactccattccactctttgaagattcggtgagcctggcctatcagcgggtccagaaggtggactgcaccgctctgaggcctgtcctgattctggggcctttgctggacgtggtgaaggagatgctggtgaatgaggctcctggcaagttctgcagatgtccccttgaggtgatgaaggcctcccagcaggccattgagcggggtgtcaaagattgcctgtttgtcgactataagcggagaagcggccatttcgatgtgaccactgtggcgtcaataaaggagatcacagaaaagaaccgacactgcctcctggacattgctccgcacgctattgagcggctccaccacatgcacatctaccccattgtcatcttcatccactacaagagcgccaagcacatcaaggagcagagagaccccatctacctgagggacaaggtgactcagaggcattccaaagagcagtttgaggcggcgcagaagcttgagcaggagtacagcaggtacttcacaggggtcatccagggaggagccctgtcaagcatttgcactcagatcttggcaatggtcaatcaagaacaaaataaagtcctgtggattccagcctgcccgctctaggagaatgctgtgctgtggatgactgcagctggccgcctgaggggacrccagactcagctcttttctagcgactgaaagtagaagtctgtcygtctatgaacatgcgggggaaggatccggaaccaggacccagaagcacctcctttgtagacagagggccacggctgcgtgcgatccaggcccaggmccacacactctgcccgtgtcacacgtgtgctttaacacaaaacagataacactaaagacgggttcagcacccacctttctttagccagctgatcagagatgctgcaaagagaacctttcggatcactcgtttacaagccttttctaagtatttggtggtttatgtttacttgaacggctccatgttgccggtgcccagcccctgtcccctctgtcaaccccctgtcgctttggtgttggtttcgttcccgtcttcagcaaaacgaccttggaacctcaatgggggctgctttgctttgggaggttcttgttggtgggaccagagctttgacaaacctcctgctccttggtggcacctctcctggaaggacatcacaactccaggtgctcagactgcctgtggcagcagaaccagtgcctttggcattttcctcccacaatggggaaggtgactttggcattcttacaaactcgtctctcggcctttctctcctgccttccacagcctctcgtttctcctccatctgtgcttattacttgaggactgtgtctgctccgtgagagctgcgtgggcagggctgcagtggggtccaggtggtgttcagctgtgctgatgcctgccattgggtcctccttaggctctgtaagtcgtgacagccttcatcagtgcaatgtttgcagggtaattcttaaactttttagagggtggcaggtacatcagttctttttgatatgaaaacattcatgtttcagacattgaattgagagcttttaggggaagcataatggttattgtcactatcaacagtctaaaaagaaaaactgaggtctttttaatcttgattacagcactcacggcatgcaccctactcagtgtgggtgtcttcgtttgggggctttttttttttttgcacttctgaggctagatatgtctggctgaagatttgatgtggttcctccttaagctatgcgtcctgttaataataggtactgtactgggctctgtgtaagtgtcgttggggtaggacctatattttaatactgttcctaacatttcattttactagcgagaaatctttgatttcattttattctttgtaattctagacactagattgtagtttagccataactgatgttttttaaaaagggatatattttcttgcacagttgttcaaaaaagagacaagtttcagtcctcaatgctgtcctttgttttacaggtacaagttttctagctcagacaaactatgaaaaactgtagactattctcaaggtattaactcgcagaccctctgggggtaggggctgttttctaagttacaggcagagtgggactgagatggtacagtgtgcacagacaggtactgagctgacagactgggattttctgtactaaaatgttactttgtatcaaaagttaaacaggctttagtacaacaaataaaggtcaatttctgt

SEQ ID NO: 180 - DNA, 484 bp, Homo sapiens
  modified_base (58)..(58): a, c, t or g
  modified_base (73)..(73): a, c, t or g
  modified_base (363)..(363): a, c, t or g
  modified_base (424)..(424): a, c, t or g
  modified_base (446)..(446): a, c, t or g
  modified_base (457)..(457): a, c, t or g
gcaggatttatggtgacgagtgaaagaaaatacacttccacagcctggaagacaaccngagcagagtgctgantggtccgttttacagagtgctgattggtctgtttttacagagtgctgattggagaaactgaaaccagaatacctgcaggcactccctgaaatgctgaagctctactcacagtttctggggaagcagccatggtttcttggggacaagatcacctttgtggatttcatcgcttatgatgtccttgagagaaaccaagtatttgagcccagctgcctgggatgccttcccaaacctgaaggacttcatctcccgatttgagggcttgggagaagatcttctggcctacatgnaagtccagccgcttcctcccaagacctgtgtttcacaaagatggctgtctgggggcaacantaggggcctttgaaggccgggnggttgggagtnaggggcccttattcagcctgctgcctt

SEQ ID NO: 181 - DNA, 1166 bp, Homo sapiens
ccccgccccgctgaggcctgtctgcagaatccacagcaaccagcaccatgcccatgacactggggtactggaacatccgcgggctggcccattccatccgcctgctcctggaatacacagactcaagctacgaggaaaagaagtacacgatgggggacgctcctgattatgacagaagccagtggctgaatgaaaaattcaagctgggcctggactttcccaatctgccctacttgattgatgggactcacaagatcacccagagcaacgccatcctgcggtacattgcccgcaagcacaacctgtgcggggaatcagaaaaggagcagattcgcgaagacattttggagaaccagtttatggacagccgtatgcagctggccaaactctgctatgacccagattttgagaaactgaaaccagaatacctgcaggcactccctgaaatgctgaagctctactcacagtttctggggaagcagccatggtttcttggggacaagatcacctttgtggatttcatcgcttatgatgtccttgagagaaaccaagtatttgagcccagctgcctggatgccttcccaaacctgaaggacttcatctcccgatttgagggcttggagaagatctctgcctacatgaagtccagccgcttcctcccaagacctgtgttcacaaagatggctgtctggggcaacaagtagggccttgaaggccaggaggtgggagtgaggagcccatactcagcctgctgcccaggctgtgcagcgcagctggactctgcatcccagcacctgcctcctcgttcctttctcctgtttattcccatctttactcccaagacttcattgtccctcttcactccccctaaacccctgtcccatgcaggccctttgaagcctcagctacccactatccttcgtgaacatcccctcccatcattacccttccctgcactaaagccagcctgaccttccttcctgttagtggttgtgtctgctttaaagggcctgcctggcccctcgcctgtggagctcagccccgagctgtccccgtgttgcatgaaggagcagcattgactggtttacaggccctgctcctgcagcatggtccctgccttaggcctacctgatggaagtaaagcctcaaccacaaaaaaaaaaaaa

SEQ ID NO: 182 - DNA, 468 bp, Homo sapiens
  modified_base (1)..(1): a, c, t or g
  modified_base (9)..(9): a, c, t or g
  modified_base (11)..(11): a, c, t or g
  modified_base (41)..(41): a, c, t or g
  modified_base (54)..(54): a, c, t or g
  modified_base (132)..(132): a, c, t or g
  modified_base (248)..(248): a, c, t or g
  modified_base (307)..(307): a, c, t or g
  modified_base (406)..(406): a, c, t or g
  modified_base (412)..(412): a, c, t or g
  modified_base (425)..(425): a, c, t or g
  modified_base (436)..(436): a, c, t or g
  modified_base (461)..(461): a, c, t or g
nactcagananttatttaataactgtagaaatccaaaaganttagcatcaaatnttgaagtcgtgagtgaagctgcgggttggcttgactgggctcagccactgagctgcctcaaccggccaaggaacgggnttatgatgactatgcggacttctatattgtcttcatctcattgtgtgtattatgtatttagtttcaataaagcatttgtaccaatggctctggagcttggaggaagactaaaggantgtgtagtgattctgagtaagatgtagacctacgcagcagagctatggggggagaaggnttaacaaagtcctttcttccaatatcagggataggtcatgaggttgcagtcccatccaaaagggtcctttgggggctaaaagggccctctggggtctcntggacnttgggggttcttngcccccccccngggggccccagggggcttgccaccnggggttt

SEQ ID NO: 183 - DNA, 2863 bp, Homo sapiens
gtgcggccagcgggcggaggcggtctcgcatcggcggcgacggagggctcaggcgtcgtcgtttgggtggggggccgctgaactgacaagcgacatttcagctcctttcacccgccggaaccccggagccggggcccgctcagccggcgttaccatgaccaaggccggtagcaagggcgggaacctccgcgacaagctggacggcaacgaactggacctgagcctcagcgacctgaatgaggtcccggtgaaggagctggctgcccttccaaaggccaccatcctggatctgtcttgtaataaactgactactctaccgtcggatttctgtggcctcacacacctggtgaagctagacctgagtaagaacaagctgcagcagctgccagcagactttggccgtctggtcaacctccagcacctggatctcctcaacaacaagctggtcaccttgcctgtcagctttgctcagctcaagaacctgaagtggttggacctgaaggataaccccctggatcctgtcctggccaaggtggcaggtgactgcttggatgagaagcagtgtaagcagtgtgcaaacaaggtgttacagcacatgaaggccgtgcaggcagatcaggagcgggagaggcagcggcggctggaagtagaacgtgaggcagagaagaagcgtgaggctaagcagcgagctaaggaagctcaggagcgggaactgcggaagcgggagaaggcggaagagaaggagcgccggagaaaggagtatgatgccctcaaagcagccaagcgggagcaggagaagaaacctaagaaggaagcaaatcaggccccgaaatctaagtctggctcccgtccccgcaagccaccaccccggaagcacactcgttcctgggctgtgctgaagctgctgctgctgctgctgctatttggtgtggcgggagggctggttgcttgtcgggtgacagagctgcagcagcagcccctctgcaccagcgtgaacaccatctatgacaatgcggtccagggtctacgccgccatgagatcctccagtgggtcctccagaccgactctcagcagtgagcttgtccccagcacctgctgcctcccagccttggagtttggattcctatggaattgggttctgctggacacaacctctttttagcatcagacctacctgccatcatcaaatggctgcagattggtacatgagacctcctctttgtaggacttcttcattccttagtcagggttccctgaaggaatgaggagaaatgggaggtggcgggggggcgtggggggcagttacctgcatgcctaaaggagtaggcttgggggtggggagagagaaaacatagccttttctagttgttatataaagctgtgtaaaggcaaggctcgtttctactaaatggtcagctgtcactacatttatacttttgtatgccacaaaccctttcattcctccctgggaatcagggtagatcaggaggaactgggggggactagaacaccacgctcagtaaatccagtctaaactgggaggtaggggtattcctgttttctttaggacctcagagatgtaagcattttagcagccacacaaaatctctggctatgaaagggacttcatgaccatccagtccaatataacacttgcagacagagaaactgaggtcttccatgacttgcctagtctcccagctagtttgaggcaaaactggattcccactctggtattctttcttccctttacatcattttccctcctttataatgtcctgagagaccagaactcacaccagaatcgattattcctcaggtgaagcatagactctttcatggtagacagatttcacgactcagagatagaaatctcttgctatcatcaggtcacgggcagctcctgtggagtcctgcccaacttatgtggcttccataaaatggcaacagtccaggctccttgcctaattttagagcattaactccctaattgccagtaagcaaggaggtggatctctgcaaacctacactgtctatgacagctctagttgtacttggtgtgactaaatacctcaaaggcaacctgcttctgcaggttttgaagtgtcagcttcataagacactgaggtttagaattgtttgattctagaccataactgaagggcataaatggaaacaggatatgaagggaaacaagtagcatcatggagctgaaaagtggtgcatcacccaatggctagcacagacaaggatcacactgtccattctcttgtctgctaaattaagcattttcttgcctcctttgcttcatcttttcacaacagctggatagagggatcagaaatgactgtgtcatggtgctcattcactgcaaactcccagttgcaagctccttggctcccccggagggagcaagaatctcatagttcagagacacagagggccttttagccctaatgaccttttggatgggactgcaactcatgactatcctgatattagaagaaaggactttgttaatcttctcccccatagctctgctgcgtaggtctacatcttactcagaatcactacacattcctttagtcttcctccaagctccagagccattggtacaaatgctttattgaaactaaatacataatacacacaatgagatgaagacaatatagaagtccgcatagtcatcataatcccgttccttggccggttgaggcagctcagtggctgagcccagtcaagccaacccgcagcttcactcacgacttcaagatttgatgctaattcttttggatttctacagttattaaataagtgtctgagtggaaaaaaaaaaaaaaaaaaaaaaaaaaaaaaaaaaaa

SEQ ID NO: 184 - DNA, 372 bp, Homo sapiens
  modified_base (362)..(362): a, c, t or g
aactgaacatagtatttattaaggtcaggatgcatgaatagactcttctcaacagaaagataattcaacagcaatcaatttacagaatttagaacagcactacatttcagcaaaatgcaactagagaacatcagataaattatagtaatttgtttttaaaaatccattaaactatctcttacctctgcaataatgtatcatacatgcagttacagaagttagtagggaaaagcatgatcttccttccctattctctgcccatccatcttccggggaaccacagggctgctgctgcccagagttgggcatgagggcttcgagggctgctgcttttccccctacatcataaccgattttcaaangggtgcttgg

SEQ ID NO: 185 - DNA, 382 bp, Homo sapiens
  modified_base (347)..(347): a, c, t or g
  modified_base (369)..(369): a, c, t or g
  modified_base (378)..(378): a, c, t or g
atagaattaacctagaattaatgagttttgtattgctctcatctatttgaagcatcagctgtgcctttcatgttgccttgtgcagccctgtgtaacctcctctgtgcctttcccatggagcactgtgtcatatcacaagtagaactacaagaagatatttctcctcagggcagaggctgggtcttccgattgaatctcccttctttcttcattgagatcctcttcttctgggaagctggtttcacatgggtgggcttaggatttttccatctttgtatctaggcaccatttggaaatcagtgttttagggagtaaggaattgcaggcacagccaaggggtgggactncagagggaactgcctggctccnggggaactnggct

SEQ ID NO: 186 - DNA, 435 bp, Homo sapiens
  modified_base (12)..(12): a, c, t or g
  modified_base (397)..(397): a, c, t or g
  modified_base (405)..(405): a, c, t or g
  modified_base (417)..(417): a, c, t or g
tctggaaagcantttttgtatttacacaacagtggacgccttttacattgcagaggggcgggtaagagcgggatggctaggaagctacagcacctatttggttatgaacacagcattttcagatggctgggggaatagatgccacttcccactcaagacagggatttgctcagcgggaaagcaggtaataaaggcagcacatcctgcactttgaactgcatccgtctcatcctgcagccaccctgtagctcaaagcacagttctggagcctattaggtccaaatctcaatctacccttgagtcagcgaggccttagggaaggaggtccctcgaagtctgtcttcctgtgggcaggatgagggacgggccacaccacaagggcagttcgctggggccnggggcctngttccccaggtnggcagttttgtttggggt

SEQ ID NO: 187 - DNA, 517 bp, Homo sapiens
  modified_base (1)..(1): a, c, t or g
  modified_base (12)..(12): a, c, t or g
  modified_base (94)..(94): a, c, t or g
  modified_base (437)..(437): a, c, t or g
  modified_base (452)..(452): a, c, t or g
  modified_base (504)..(504): a, c, t or g
  modified_base (513)..(513): a, c, t or g
nattcggcacgnggagaaggaccaactaccccttccctttgaggagcaagtctctgccgatcagcaaggcaaggccaggagccctcctggcganaaggcaggccacaaatctgttctcccccaggagaagtagcagtgccagggctttgcgtttctggtaacttccacccaaaccacaccagagagaaacaccgtagtggagaagggaagtgggagcgctgactgctgtgtgccaggagagtagaaaggcccaggtctgtgccaccacccctccccaaagctcagtgcacccagagtctcacagggaccaacacggtgcctcggtcctgcttccatccatgcaagtgttcctccgttcaccagggtgttctgaggcagttcaagttgttttcccccaaggcagcacgcattcaccgttgccattgatgaacacacgnacgggttagggcacntgggagcccaagcacattgccactttgggacagggccccgccaggcgatttnttttttggnttta

SEQ ID NO: 188 - DNA, 1133 bp, Homo sapiens
agagagcgccggaagcggtccgagaatgaagagtgtgatctaccatgcattgtctcagaaagaggcgaatgactccgatgtccagccttcaggagcacagcgggccgaggccttcgtgagggccttcctgaagcgcagcacgccccgcatgagcccgcaggcccgcgaggaccagctgcagcgcaaggcggtggtcctggagtacttcacccgccacaagcgcaaggagaagaagaagaaagccaaaggcctctctgccaggcaaaggagggagctgcggctctttgacattaaaccagagcagcagagatacagccttttcctccctctccatgaactctggaaacagtacatcagggacctgtgcagtgggctcaagccagacacgcagccacagatgattcaggccaagctcttaaaggcagatcttcacggggctattatttcagtgacaaaatccaaatgcccctcttatgtgggtattacaggaatccttctacaggaaacaaagcacattttcaaaattatcaccaaagaagaccgcctgaaagttatccccaagctaaactgcgtgttcactgtggaaaccgatggctttatttcctacatttacgggagcaaattccagcttcggtcaagtgaacggtctgcgaagaagttcaaagcgaagggaacgattgacctgtgaattctttgccgtctaaggcagttgtttatgacagctgaaaactggacactccctaaatgtccacctttcagtgaagagatagttaagccaattccatttatagaccacctccagccagtgacgctccgagttgaggatgttgaacaacatgggaaggtcgcagcgtactaagtgaagaagtcagaggacagaggaatttctctttctaggagattttcattttgtgtgactcccatggggaggaacagactggcaggaagcacaccggggttaacactggttgacttgaataggattattcgatttttaaaaatacttttccatgttttctgagtgctctatgataaatcagttgcatctgtgataatacaatacatatgtggacataaacagggatcaaataaaggaggtattgctgcaaaaaaaaaaaaaaaaaaaaaaaaaa

SEQ ID NO: 189 - DNA, 328 bp, Homo sapiens
  modified_base (8)..(8): a, c, t or g
  modified_base (23)..(23): a, c, t or g
  modified_base (174)..(174): a, c, t or g
  modified_base (190)..(190): a, c, t or g
  modified_base (196)..(196): a, c, t or g
  modified_base (205)..(205): a, c, t or g
  modified_base (215)..(215): a, c, t or g
  modified_base (217)..(217): a, c, t or g
  modified_base (220)..(220): a, c, t or g
  modified_base (257)..(257): a, c, t or g
  modified_base (276)..(276): a, c, t or g
  modified_base (286)..(286): a, c, t or g
  modified_base (294)..(294): a, c, t or g
  modified_base (316)..(316): a, c, t or g
caacttgnttttaagtgacattnatagaacactccgcccagcaacagcacagtacatattcttttcaattgcacatggaacattcaccaagataggtctcaatacatttaaaaggatcaaaattatgttaaacatgattaacaaaacagaacattttgtagaagagctagaggnttaagtaaaaaaaaanttcctngattacgangacactaaangngtntataggtgaaaatttgagggaggatactgtgccgggnagtacagtgtctactagangtttcagaangagggaancagagaaattcaggggcggggntgtgaggattga

SEQ ID NO: 190 - DNA, 463 bp, Homo sapiens
  modified_base (364)..(364): a, c, t or g
  modified_base (378)..(378): a, c, t or g
  modified_base (393)..(393): a, c, t or g
  modified_base (417)..(417): a, c, t or g
  modified_base (447)..(447): a, c, t or g
  modified_base (455)..(455): a, c, t or g
  modified_base (460)..(460): a, c, t or g
gttcatgccacccttttttagaccatattaagtaacttcctggcattgcatggcatctgtaacctgtcatggcgctggcgggagtgtggcagtgaggacgaccaagatcactctggttgccatcttggttttggtgggttttgggctgccttctttaccgcaacctgttttatcagcaaggtctttacgacctgtatcttgtgatgacctcctatctcatcctattacttagaatgccttcaccattgggcattggcagtgcagcccagtaggtctcaacctcattttaccccgcccctactcaagatgaagttgctctggttcaaacgcctttggataccatgaggttttggaatctcgatanttcttctggggaantgttcttcttttaantcttcaatctcacatcccagcccnggatttctctggtttcccctttctggaaantttaggtngacangta

SEQ ID NO: 191 - DNA, 278 bp, Homo sapiens
  modified_base (66)..(67): a, c, t or g
  modified_base (170)..(170): a, c, t or g
  modified_base (206)..(206): a, c, t or g
  modified_base (210)..(210): a, c, t or g
cgtgctcacggattttattacacagatagtggcggcaatggcctcagcccagcccaccctcacctnnttttccagcccacaaagggggacgatcacggccagcaaaagcgattgctgagaggggaaacagtccagagtccaacagcagaacttgggggaagcggtcgggntggccaggaacataaactatgtataggggccggggncttntgccaggggttcccctggaccaggacgccaggtagggcagggaacctcagtagtcctccacccagcca

SEQ ID NO: 192 - DNA, 458 bp, Homo sapiens
  modified_base (67)..(67): a, c, t or g
  modified_base (117)..(117): a, c, t or g
  modified_base (131)..(131): a, c, t or g
  modified_base (133)..(133): a, c, t or g
  modified_base (135)..(135): a, c, t or g
  modified_base (198)..(198): a, c, t or g
  modified_base (211)..(211): a, c, t or g
  modified_base (242)..(242): a, c, t or g
  modified_base (281)..(281): a, c, t or g
  modified_base (313)..(313): a, c, t or g
  modified_base (382)..(382): a, c, t or g
  modified_base (413)..(413): a, c, t or g
  modified_base (422)..(422): a, c, t or g
  modified_base (430)..(430): a, c, t or g
  modified_base (444)..(444): a, c, t or g
  modified_base (456)..(456): a, c, t or g
tggagagctatgatgaggccatcgcaatctgcagcgagcttacagcctggccaaggagcagcggctnaacttcggggacgacatccccagcgctcttcgaatcgcgaagaagaagcnctggaacagcattnangngcggcgcatccaccaggagagcgagctgcactcctacctctccaggctcattgccgcggagtntaggagggagctngaagagtgccagcgaaaccacgagggtgatnaggacgacagccacgtccgggcccagcaggctttcattnaggccaagcacgacaagtacatggcggacatngacgagcttttttcttcaggttggatgagaagaggaagaagcgagacattccccgacttacctgtgttnggcaagattcagcttttgagttgattgccgngaccgttgnattcacgnccagttggcttcancttacggacccnaa

SEQ ID NO: 193 - DNA, 1646 bp, Homo sapiens
gctgttgcgggagcgcgccctcagcgaagcaagtgaggcatctcactgggaaagtcgaatgtgtgtggcggccgccgccgaggcgggttccgaagagacctcagcagggcaggccagggcctacgcgaacgcccacccttaagagcgcggggacagggaactggagcgttcctcccagcccccgacgtcgcgggcccagtgtccccgtccaggctggttgggcgcacgcgcggccccactcgcccccacgcgtgcgtccccgctggtcccgcccccggccggaagttccggcggcggagctgggccgggcccgagcggatcgcgggctcgggctgcggggctccggctgcgggcgctgggccgcgaggcgcggagcttgggagcggagcccaggccgtgccgcgcggcgccatgaagggcaaggaggagaaggagggcggcgcacggctgggcgctggcggcggaagccccgagaagagcccgagcgcgcaggagctcaaggagcagggcaatcgtctgttcgtgggccgaaagtacccggaggcggcggcctgctacggccgcgcgatcacccggaacccgctggtggccgtgtattacaccaaccgggccttgtgctacctgaagatgcagcagcacgagcaggccctggccgactgccggcgcgccctggagctggacgggcagtctgtgaaggcgcacttcttcctggggcagtgccagctggagatggagagctatgatgaggccatcgccaatctgcagcgagcttacagcctggccaaggagcagcggctgaacttcggggacgacatccccagcgctcttcgaatcgcgaagaagaagcgctggaacagcattgaggagcggcgcatccaccaggagagcgagctgcactcctacctctccaggctcattgccgcggagcgtgagagggagctggaagagtgccagcgaaaccacgagggtgatgaggacgacagccacgtccgggcccagcaggcctgcattgaggccaagcacgacaagtacatggcggacatggacgagcttttttctcaggtggatgagaagaggaagaagcgagacatccccgactacctgtgtggcaagatcagctttgagctgatgcgggagccgtgcatcacgcccagtggcatcacctacgaccgcaaggacatcgaggagcacctgcagcgtgtgggtcattttgaccccgtgacccggagccccctgacccaggaacagctcatccccaacttggctatgaaggaggttattgacgcattcatctctgagaatggctgggtggaggactactgaggttccctgccctacctggcgtcctggtccaggggagccctgggcagaagcccccggcccctatacatagtttatgttcctggccaccccgaccgcttcccccaagttctgctgttggactctggactgtttcccctctcagcatcgcttttgctgggccgtgatcgtccccctttgtgggctggaaaagcaggtgagggtgggctgggctgaggccattgccgccactatctgtgtaataaaatccgtgagcacgaggtgggacgtgctggtgtgtgaaaaaaaaaaaaaaaaaaaaaaaaaaaaaaaaaaaaaaaaaaaaa

SEQ ID NO: 194 - DNA, 417 bp, Homo sapiens
  modified_base (6)..(6): a, c, t or g
  modified_base (273)..(273): a, c, t or g
  modified_base (299)..(299): a, c, t or g
  modified_base (373)..(373): a, c, t or g
  modified_base (407)..(407): a, c, t or g
ggtttnatttgtattttgtatacaaaagattctccaaacaaactaaaattgtttatttcaccacaaactatcaatccagaaaggttgtgggacttttgcacaaccagataagaccgcagccctctaaggatgaacctgcatgaggggaacacaggtccctgccaagcagagtggctccgaaatgggcatctctgggcaggttttctctccctttctgtcgaaacctggggccttggcagggtgtgggtaggctaatgcctgtaatcccaacantttggggagggccaaggcgggaaggntcgcttgagggccagggagtttcaagtctaggcttggggtaacacagtgaggatcctatctctacaaaaaaatntttggaaaattagggggcagggagcgttgggtgncaagccacta

SEQ ID NO: 195 - DNA, 398 bp, Homo sapiens
  modified_base (15)..(16): a, c, t or g
  modified_base (246)..(246): a, c, t or g
  modified_base (321)..(321): a, c, t or g
  modified_base (335)..(335): a, c, t or g
  modified_base (350)..(350): a, c, t or g
  modified_base (370)..(370): a, c, t or g
gagacacaaaatttnntttaatagaaattttgtttgtagttcttacattctcagtgtgagccaatctgggacccactgccccacccagaagtggcccagtcctgggggcaggggagaaagggaggggtgaaatgagaagagccccgttcttcctcagtgctggggggttggagacaccacccccttctgctgccctcctctgggctccaggaaggagagcagatgaaatctcaggcctgtggcttnctccacaccactgccccccagggttgggaggggagctaagagatgagagaaggggacagagggcaagaaaagatnttgatcaagaaagntgaggaaccaggggntgaggggcttgaagggaganttcaaagattaaaattcccagttttaaa

SEQ ID NO: 196 - DNA, 320 bp, Homo sapiens
aggacgagctgtagagaggcctgcctccagggctggactgaggcctgagcgctcctgccgcagagcttgccgcgccaaataatgtctctgtgagactcgagaactttcatttttttccaggctggttcggatttggggtggattttggttttgttcccctcctccactctcccccaccccctccccgccctttttttttttttttttaaactggtattttatctttgattctccttcagccctcacccctggttctcatctttcttgatcaacatcttttcttgcctctgtccccttctctcatctcttaggctcccctc

SEQ ID NO: 197 - DNA, 1899 bp, Homo sapiens
gtccgtactgcagagccgctgccggagggtcgttttaaagggccgcgttgccgccccctcggcccgccatgctgctatccgtgccgctgctgctcggcctcctcggcctggccgtcgccgagcccgccgtctacttcaaggagcagtttctggacggagacgggtggacttcccgctggatcgaatccaaacacaagtcagattttggcaaattcgttctcagttccggcaagttctacggtgacgaggagaaagataaaggtttgcagacaagccaggatgcacgcttttatgctctgtcggccagtttcgagcctttcagcaacaaaggccagacgctggtggtgcagttcacggtgaaacatgagcagaacatcgactgtgggggcggctatgtgaagctgtttcctaatagtttggaccagacagacatgcacggagactcagaatacaacatcatgtttggtcccgacatctgtggccctggcaccaagaaggttcatgtcatcttcaactacaagggcaagaacgtgctgatcaacaaggacatccgttgcaaggatgatgagtttacacacctgtacacactgattgtgcggccagacaacacctatgaggtgaagattgacaacagccaggtggagtccggctccttggaagacgattgggacttcctgccacccaagaagataaaggatcctgatgcttcaaaaccggaagactgggatgagcgggccaagatcgatgatcccacagactccaagcctgaggactgggacaagcccgagcatatccctgaccctgatgctaagaagcccgaggactgggatgaagagatggacggagagtgggaacccccagtgattcagaaccctgagtacaagggtgagtggaagccccggcagatcgacaacccagattacaagggcacttggatccacccagaaattgacaaccccgagtattctcccgatcccagtatctatgcctatgataactttggcgtgctgggcctggacctctggcaggtcaagtctggcaccatctttgacaacttcctcatcaccaacgatgaggcatacgctgaggagtttggcaacgagacgtggggcgtaacaaaggcagcagagaaacaaatgaaggacaaacaggacgaggagcagaggcttaaggaggaggaagaagacaagaaacgcaaagaggaggaggaggcagaggacaaggaggatgatgaggacaaagatgaggatgaggaggatgaggaggacaaggaggaagatgaggaggaagatgtccccggccaggccaaggacgagctgtagagaggcctgcctccagggctggactgaggcctgagcgctcctgccgcagagcttgccgcgccaaataatgtctctgtgagactcgagaactttcatttttttccaggctggttcggatttggggtggattttggttttgttcccctcctccactctcccccaccccctccccgccctttttttttttttttttaaactggtattttatcctttgattctccttcagccctcacccctggttctcatctttcttgatcaacatcttttcttgcctctgtgccccttctctcatctcttagctcccctccaacctggggggcagtggtgtggagaagccacaggcctgagatttcatctgctctccttcctggagcccagaggagggcagcagaagggggtggtgtctccaaccccccagcactgaggaagaacggggctcttctcatttcacccctccctttctcccctgcccccaggactgggccacttctgggtggggcagtgggtcccagattggctcacactgagaatgtaagaactacaaacaaaatttctattaaattaaattttgtgtctc

SEQ ID NO: 198 - DNA, 379 bp, Homo sapiens
  modified_base (315)..(315): a, c, t or g
  modified_base (321)..(321): a, c, t or g
  modified_base (359)..(359): a, c, t or g
ggaccctacaaacctcccttcagttgcccggaagttggtcttccatggacaacacaaaggaggccgtgagtcctagcctcacctggccagggtcaaggtcatttgccacccttggcttcagggagggaaactgtgtctcccacagccccagtgacttcaagcgggcctgggctccagggaagctggccacctctgagcagggcccatcctgtccggatttgcaaattttagggtcctgagccaagtatggatggttcagaatttgtttctttcctgggaggagaagagagctccctttgttttcttttttccccntttccntttatttcttcttgggaagacccttattaaatgatctnttaggagggccccttgaaaa

SEQ ID NO: 199 - DNA, 2420 bp, Homo sapiens
acctcgcggggcgcgggaaagaggcagagcgcgcgcagatttctcaaggggaagataaaatgactaagaggaagaagctgcggacctcaggagagggactctgtcctccaaaacccctaaagaacccaaggctaggagacttctatggggacccccagagttccatgttgggctgtttacatcaccctgaggagccagagggcaaattgggacctgttccctctacacagcagcacggggaggaaccaggaaaggccgtctccagctcccctgatgaggaaacaggatctccctgccggctcctccgtcaaccagaaaaggagccagctccccttcctccttcccagaactcattcgggaggtttgttccccagtttgcaaaatccaggaagacagtgacaagaaaagaagagatgaaggatgaggaccgtgggagtggggcctttagcctggaaacaatcgcagagtccagcgcccagagtccaggatgccagctgctagtggagaccctgggggtccccctccaggaggccacggagctgggggacccaacgcaggcagacagtgcccgccctgagcagagcagccagagccctgtgcaggcggtgcccggcagtggggattctcagcctgatgaccctccagacagggggacggggttgtccgcctcacagagggccagccaagaccacctgtcagaacaaggggccgatgacagcaagcctgagacagacagggttccaggtgacggtggccaaaaggaacacctaccaagcattgattctgaaggggagaagccagacagaggagccccccaggagggaggggcccaaaggacagcaggggctggcctgcctggagggccccaggaggagggagacggtgtcccctgtaccccagcatcagctcctacctcaggccctgctccaggactgggccctgcctcttggtgcctggaacccgggtctgtggcccagggctcccctgacccccagcagacccccagcaggatgggtagggaaggggaagggactcatagcagcctgggatgctcctccctcgggatggttgtcatcgcagacctgagcacagaccccactgagctggaagagagggctctggaggtggctgggcccgatgggcaggccagtgccatatcacctgcctctcccaggaggaaggccgctgatggaggccacaggagggccttgccaggctgcacctcgctcactggggaaaccacaggagaaagtggggaggcagggcaggatggcaagccccccggcgatgtcctagtgggccctacagcctccctggctctggcacctgggagcggagagtccatgatgggtgctggagattccggtcatgcatccccggacacaggtccatgtgtcaatcagaagcaggagccaggtcctgctcaagaggaagccgagttaggtggccagaacctcgaacgagacctcgaggggttccgtgtgtccccgcaagcctctgttgtgctggaacacagagaaatagcagacgaccctctccaggagcccggggctcagcagggcattccagacaccacctcagagctggcagggcagcgagaccacctgcctcattctgcagaccagggcacctgggcagactctttagctgtggaactcgacttcctgctggacagccagatacaggatgccctggacgcctctgacttcgaagccccacctgagcagctctttccttcggggaacaagccgggcccttgctggccgggccccagctcacatgccaatggagaccctgttgcagtggccaaggcccagccgagccggctgatcatgggcacccaccgggacctggaagctttcaagcgccttaactaccggaagacaaagctgggaggcaaagcccccctgccttacccttccaaggggcctgggaatatccctcgaggggacccaccctggagggagttgtaggccactttgaggtctgtgtttcctttgccacccagcccccatgtccgcagacctcctccaagatgctccagggggtcctagtggaccctacaaacctcccttcagttgcccggaagttggtcttccatggacaacacaaaggaggccgtgaggtcctggcctcacctggccagggtcaaggtcatttgccacccttggcttcagggagggaaactgtgtctcccacagccccagtgacttcaagcgggcctgggctccaggaagctggccacctctgagcagggcccatcctgtccggatttgcaaattttagggtcctgagccaagtatggatggttcagaatttgtttctttcctggaggagaagagagctccctttgttttctttctccccatttccattttatttcttctgggaagacccataataaatgattctgtagaggc

SEQ ID NO: 200 - DNA, 436 bp, Homo sapiens
  modified_base (92)..(92): a, c, t or g
  modified_base (298)..(298): a, c, t or g
  modified_base (334)..(334): a, c, t or g
  modified_base (339)..(339): a, c, t or g
  modified_base (346)..(346): a, c, t or g
  modified_base (413)..(413): a, c, t or g
  modified_base (417)..(417): a, c, t or g
  modified_base (428)..(428): a, c, t or g
gacaatgagaatatttattgagggtttattgagtgcagggagaagggcttgatgccttggggtgggaggagagacccctcccctgggatccngcagctctagtctcccgtggtggggggtgagggatgagaacctatgaacattctgtaggggccactgtcttctccacggtgctcccttcatgcgtgacctggcagctgtagcttttgtgggacttccactgctcaggcgtcaggctcaggtagctgctggccgcgtacttgttgttgctttgtttggagggtgtggtggtctccantcccgccttgacggggctgctatctgccttccaggncactntcacggntcccgggtagaagtcacttatgagacacaccagtgtggccttgttggcttgaagctcctcagagganggtnggaacagagtnaccgaggg

SEQ ID NO: 201 - DNA, 435 bp, Homo sapiens
  modified_base (131)..(131): a, c, t or g
  modified_base (383)..(383): a, c, t or g
  modified_base (393)..(393): a, c, t or g
  modified_base (422)..(422): a, c, t or g
ggttcttgggccaatttcttgctgactcagccccactctgtgtcggagtctccggggaagacggtaaccatctcctgcaccggcaacagaggcagcattgcgccaactatgtgcagtggtaccagcagcgnccgggcagtgccccaccactgtgatctatgaagataaccaaagaccctctggggtccctgatcggttctctggctccatcgacagctcctccaactcagcctccctcactatctctggactgaagcctgaggacgaggctgactactactgtcagttttatgagagcagcaatcattggggtgttcggcggagggaccaagctgaccgtcctaggtcagacccaaggttgcccccctcggttcactctgttncccaccctcntttgagggagcttcaaggccaacaagggncacattggtgtgt

SEQ ID NO: 202 - DNA, 377 bp, Homo sapiens
  modified_base (7)..(9): a, c, t or g
  modified_base (160)..(160): a, c, t or g
  modified_base (235)..(235): a, c, t or g
  modified_base (242)..(242): a, c, t or g
  modified_base (262)..(262): a, c, t or g
  modified_base (289)..(289): a, c, t or g
  modified_base (314)..(314): a, c, t or g
  modified_base (366)..(366): a, c, t or g
  modified_base (373)..(373): a, c, t or g
gtaaaannnaaaattttatttggctgtatatacaatttaagctattaaaatttgtacaatatttacaaattaaataatcatctgaaactgtctccaacaactcttgtaacacaaaaccaaggggaaaagacaggggcaggcaggtcccagctcctgtggnccctccttgggcacagagccttttctaaactggaaagaccaggggtctgggcactcctgttcctctttcccgggnttaagcnttcaacttcaaaagacaaantttaagccaaaagacactagtaaggangtatttccatttctaaacttcagangttctgccagttgaaaagtgggccttcctagggcgctggggtttgccgtggntcagggngccg

SEQ ID NO: 203 - DNA, 412 bp, Homo sapiens
  modified_base (287)..(287): a, c, t or g
  modified_base (299)..(299): a, c, t or g
  modified_base (327)..(327): a, c, t or g
  modified_base (393)..(393): a, c, t or g
  modified_base (405)..(405): a, c, t or g
ggtcagttccagccttcctctccaactcttcagccctgtgttctgctggggccatgaaggcagaaggtttagcctctgagaagccctcttcttcccccacccctttccaggagaaggggctgcccctccaagccctacttgtatgtgcggagtcacactgcagtgccgaacagtattagctcccgttcccaagtgtgggactccagaggggctggaggcaagctatgaacttgctcgctggcccacccctaagactggtacccatttccttttcttaccctgatctncccagaagcctnttgtggttggtggctgtgcccctatggncctgtggcattttctgcgtcttactgggcaaccacacaagttaaggggaaagggaatggcctgggnagttgggtgtgnaggcggg

SEQ ID NO: 204 - DNA, 3074 bp, Homo sapiens
gggggtggggagtgttgttaaccggaggggcagccgcagtcgcgcggattgagcgggctcgcggcgctgggttcctggtctccgggccagggcaatgttccgcacggcagtgatgatggcggccagcctggcgctgaccggggctgtggtggctcacgcctactacctcaaacaccagttctaccccactgtggtgtacctgaccaagtccagccccagcatggcagtcctgtacatccaggcctttgtccttgtcttccttctgggcaaggtgatgggcaaggtgttctttgggcaactgagggcagcagagatggagcaccttctggaacgttcctggtacgccgtcacagagacttgtctggccttcaccgtttttcgggatgacttcagcccccgctttgttgcactcttcactcttcttctcttcctcaaatgtttccactggctggctgaggaccgtgtggactttatggaacgcagccccaacatctcctggctctttcactgccgcattgtctctcttatgttcctcctgggcatcctggacttcctcttcgtcagccacgcctatcacagcatcctgacccgtggggcctctgtgcagctggtgtttggctttgagtatgccatcctgatgacgatggtgctcaccatcttcatcaagtatgtgctgcactccgtggacctccagagtgagaacccctgggacaacaaggctgtgtacatgctctacacagagctgtttacaggcttcatcaaggttctgctgtacatggccttcatgaccatcatgatcaaggtgcacaccttcccactctttgccatccggcccatgtacctggccatgagacagttcaagaaagctgtgacagatgccatcatgtctcgccgagccatccgcaacatgaacaccctgtatccagatgccaccccagaggagctccaggcaatggacaatgtctgcatcatctgccgagaagagatggtgactggtgccaagagactgccctgcaaccacattttccataccagctgcctgcgctcctggttccagcggcagcagacctgccccacctgccgtatggatgtccttcgtgcatcgctgccagcgcagtcaccaccacccccggagcctgcggatcaggggccaccccctgccccccaccccccaccactcttgcctcagccccccaacttcccccagggcctcctgcctccttttcctccaggcatgttcccactgtggccccccatgggcccctttccacctgtcccgcctccccccagctcaggagaggctgtggctcctccatccaccagtgcagcagccctttctcggcccagtggagcagctacaaccacagctgctggcaccagtgctactgctgcttctgccacagcatctggcccaggctctggctctgccccagaggctggccctgcccctggtttccccttccctcctccctggatgggtatgcccctgcctccaccctttgccttccccccaatgcctgtgccccctgcgggctttgctgggctgaccccagaggagctacgagctctggagggccatgagcggcagcacctggaggcccggctgcagagcctgcgtaacatccacacactgctggacgccgccatgctgcagatcaaccagtacctcaccgtgctggcctccttggggcccccccggcctgccacttcagtcaactccactgaggagactgccactacagttgttgctgctgcctcctccaccagcatccctagctcagaggccacgaccccaaccccaggagcctccccaccagcccctgaaatggaaaggcctccagctcctgagtcagtgggcacagaggagatgcctgaggatggagagcccgatgcagcagagctccgccggcgccgcctgcagaagctggagtctcctgttgcccactgacactgccccagcccagccccagcctctgctcttttgagcagccctcgctggaacatgtcctgccaccaagtgccagctccctctctgtctgcaccagggagtagtacccccagctctgagaaagaggcggcatcccctaggccaagtggaaagaggctggggttcccatttgactccagtcccaggcagccatggggatctcgggtcagttccagccttcctctccaactcttcagccctgtgttctgctggggccatgaaggcagaaggtttagcctctgagaagccctcttcttcccccacccctttccaggagaaggggctgcccctccaagccctacttgtatgtgcggagtcacactgcagtgccgaacagtattagctcccgttcccaagtgtggactccagaggggctggaggcaagctatgaacttgctcgctggcccacccctaagactggtacccatttccttttcttaccctgatctccccagaagcctcttgtggtggtggctgtgccccctatgccctgtggcatttctgcgtcttactggcaaccacacaactcagggaaaggaatgcctgggagtgggggtgcaggcgggcagcactgagggaccctgccccgcccctccccccaggcccctttcctctgcagcttctcaagtgagactgacctgtctcacccagcagccactgcccagccgcactccaggcaagggccagtgcgcctgctcctgaccactgcaatcccagcgcccaaggaaggccacttctcaactggcagaacttctgaagtttagaattggaattacttccttactagtgtcttttggcttaaattttgtcttttgaagttgaatgcttaatcccgggaaagaggaacaggagtgccagactcctggtctttccagtttagaaaaggctctgtgccaaggagggaccacaggagctgggacctgcctgcccctgtcttttccccttggttttgtgttacaagagttgttggagacagtttcagatgattatttaatttgtaaatattgtacaaattttaatagcttaaattgtatatacagccaaataaaaacttgcattaacaaaaaaaaaaaaaaaaaaaaaaaaa

SEQ ID NO: 205 - DNA, 378 bp, Homo sapiens
  modified_base (269)..(269): a, c, t or g
ttttattacaaaatttttattttattcaaaatacacatgctatctttgtccacatttcaatccaaaccacccagtcacccccaattccaaaaaacaggcctttgttttataacatcgctgaaaacaagccatttttgacgtgggtttggagtcattattctatgacactcactctgccctaaggggactgggattttgtaaggctgcttactgtggggatgtccacgggagtcagtgactctcataacagagtggggactgctttaggnaatccaagttaacattaggaggtgacaccagtggggcacactttgggtaggaaaagtactgcaccgtgaggctccctccttctgccaatctcatttgttcccaaattga

SEQ ID NO: 206 - DNA, 249 bp, Homo sapiens
  modified_base (196)..(196): a, c, t or g
  modified_base (216)..(216): a, c, t or g
  modified_base (232)..(232): a, c, t or g
atttgtcacattaaaattcataatacgattgtgtgaatgtgtgtgagactgactgagagtgtgagacttttactagaaaagtgagtccactagaaaatctgtgacaagttggtttttaaagtctgaacagttgatattaagcatatctgaaaaaagcaagtaaatattttaacaaaactatgactcagggaccctncgaggaaggattagtccccnccttcggatttttaanggagtaaaagggcctga

SEQ ID NO: 207 - DNA, 2738 bp, Homo sapiens
cgcggaattccgcggaattccgcgccgccgccgccggcagaccccgcgctccggctccggctcggctcgctcggctccggtgcgcgccgaggccatgcagcgccggggcgccctgttcggcatgccgggcggcagcggaggcaggaagatggctgcaggagacatcggcgagctgctagtgccccacatgcccacgatccgcgtgcccaggtccggcgacagggtctacaagaacgagtgcgccttctcctacgactctcccaattctgaaggtggactctatgtatgcatgaatacatttttggcctttggaagggaacatgttgaaagacattttcgaaaaactggacagagtgtatacatgcacctgaaaagacatgcgcgagagaaggtaagaggggcgtctggtggagcgttaccaaaaaggaggaattccaagatttttttagatctagatactgatgacgatttaaatagcgacgattatgaatatgaagatgaagccaaacttgttatattcccagatcactatgaaatagcactaccaaatattgaggagttaccagccctggtaacaattgcttgtgatgcagttctcagctcaaaatctccatacagaaagcaggacccagacacgtgggaaaatgaattgccagtatctaaatatgccaacaacctcacccagctggacaatggagtcaggattcctccaagtggttggaagtgtgccagatgcgacctgcgagaaaacctctggttgaatctgactgacggctctgtcctgtgtggaaagtggttctttgacagctctgggggcaacgggcatgcgctggagcattacagagacatgggctacccactagccgtgaaactgggaaccatcactcctgacggggcagatgtttattcttttcaagaagaagaacctgttttggatcctcatttggccaagcacttagcgcattttggaattgatatgcttcatatgcatgggacagagaatgggctccaggacaatgacatcaagctgagggtcagtgagtgggaagtgatccaggagtcgggcacgaaactgaagccaatgtatggtcctggctacacgggtctgaagaacctgggcaacagctgctatctcagctctgtcatgcaggccatcttcagcatcccagaattccagagagcgtatgtaggaaaccttcccagaatatttgactactcgcctttagatccaacacaagatttcaacacacagatgactaagttaggacatggccttctctcaggccagtattcaaagcctccggtgaaatctgaactcattgaacaggtgatgaaggaggagcacaagccacagcagaacgggatctctccgcgcatgtttaaggcctttgtaagcaagagccacccggaattctcctctaacaggcagcaagatgcccaggaattcttcttgcacctggtgaatctagtagagaggaaccgcatcggctcagaaaacccaagcgatgtttttcgttttttggtggaagaacgcattcagtgctgtcagacccggaaagtccgctacacggagagggtggattacctgatgcagttacctgtggccatggaggcggcaaccaacaaggatgaactgatcgcttatgaactaacgagaagggaagcagaagcaaacagaagaccccttcctgagttggtacgtgccaagataccatttagtgcctgccttcaggccttctctgaaccagaaaatgttgatgatttctggagcagtgccctacaagcaaagtctgcgggtgtgaaaacatctcgctttgcttcattccctgaatacttggtagtgcagataaagaagttcacttttggtcttgactgggttcccaaaaaatttgatgtttctattgatatgccagacctacttgatatcaaccatctccgagccagggggttacagccaggagaggaagaacttccagacatcagcccccccatagtcattcctgatgactcaaaagatcgcctgatgaaccaattgatagacccatcagacatcgatgagtcatcagtgatgcagctggccgagatgggtttcccgctggaagcatgtcgcaaggctgtgtacttcactggaaatatgggcgccgaggtggccttcaactggatcattgttcacatggaagagccagattttgctgagccgctgaccatgcctggttatggaggggcagcttctgctggagcctctgtttttggtgcttctggactggataaccaacctccagaggaaatcgtagctatcatcacctccatgggatttcagcgaaatcaggctattcaggcactacgagcaacgaataataacctggaaagagcactggattggatctttagccaccctgagtttgaagaagacagtgattttgtgattgagatggagaataatgccaatgcaaacattatttctgaggccaagcccgaaggacctagagtcaaggatggatctggaacatatgagctatttgcattcatcagtcacatgggaacatccacaatgagtggtcattacatttgccatatcaaaaaggaaggaagatgggtgatttacaatgaccacaaagtttgtgcctcagaaaggccccctaaagacctgggctacatgtacttttaccgcaggataccaagctaaacctcaaatataaaaattggcgaaaagaagccatacgcctttttaatttgcc

SEQ ID NO: 208 - DNA, 407 bp, Homo sapiens
  modified_base (13)..(13): a, c, t or g
  modified_base (94)..(94): a, c, t or g
  modified_base (304)..(304): a, c, t or g
  modified_base (321)..(321): a, c, t or g
  modified_base (363)..(363): a, c, t or g
  modified_base (400)..(400): a, c, t or g
cgctgttaaaaancatcttctttatttattgggttactttattcagggtgggttccctccaccccaaaaataccagctccaggaaaaccatggnatctccccagcactttgcagggcctggcatgtggaagatgtaccagtaatatttgctgtatgaatgaatgagtctcttcatgtgcaggtgacttatcctgcctctgccactcgacggatgtttcagatgccccttagcggatctaatgatgtttccttgggctcaagcacaaaagactcctgcttagctgggggaagcagggccaggccngggggaattgcagcctntggggaattcagagcccggccctttccagctaatcgggcctncccacaggacacaaggagggagaggggtttttcagtngagtcct

SEQ ID NO: 209 - DNA, 785 bp, Homo sapiens
  modified_base (597)..(597): a, c, t or g
  modified_base (660)..(660): a, c, t or g
cctaggatagctcctctcctgccagagctaggcaggcgccgaagtagccgcatggccccgtcagaagaccccagggactggagagccaacctcaaaggcaccatccgtgagacaggcctggagaccagctccggtgggaagctggctggccatcagaagaccgtccccacggctcacctgacttttgttattgactgcacccacgggaagcagctctccctggcagcaaccgcatcaccaccccaagcccccagtcccaatcgagggcttgtcaccccaccaatgaagacctacatcgtgttctgtggggaaaactggccccatctgactcgggtgacccccatgggtgggggatgccttgcccaggccagggccaccctgccgctctgcagagggtctgtggcctcagcttccttcccagtcagcccgctctgcccccaggaggttcccgaggctaaggggaaacccgtgaaggctgcgcctgtgaggtcttcaacttggggaacagtcaaggactcactgaaagccctctcctcttgtgctgtggcaggccgattagctggagggccgggctctgatgcccagaggctgcaattnccaggccctgccctgctttcccagctaaagcagagtctttgtgcttgagccaaggaaacatcnatagatccgctaaagggcattctgaaacatccgtcgagtgggcagaggcaggataatcaccctgcacattgaagagactcattcattcatacagcaaataatactggtcatcttcacatgccagc

SEQ ID NO: 210 - DNA, 948 bp, Homo sapiens
acatcctggaagagtggcctaggacagctcctctcctgccagagctaggcaggcgccgaagtagccgcatggccccgtcagaagatcccagggactggagagccaacctcaaaggcaccatccgtgagacaggcctggagaccagctccggtgggaagctggctggccatcagaagaccgtccccacggctcacctgacttttgttattgactgcacccacgggaagcagctctccctggcagcaaccgcatcaccaccccaagcccccagtcccaatcgagggcttgtcaccccaccaatgaagacttacatcgtgttctgtggggaaaactggccccatctgactcgggtgacccccatgggtgggggatgccttgcccaggccagggccaccctgccgctctgcagagggtctgtggcctcagcttccttcccagtcagcccgctctgcccccaggaggttcccgaggctaaggggaaacccgtgaaggctgcgcctgtgaggtcttcaacttggggaacagtcaaggactcactgaaagccctctcctcttgtgtctgtgggcaggccgattagctggaagggccgggctctgatgcccagaggctgcaattcccagggcctggccctgcttccccagctaagcaggagtcttttgtgcttgagccaaggaaacatcattagatccgctaaggggcatctgaaacatccgtcgagtggcagaggcaggataagtcacctgcacatgaagagactcattcattcatacagcaaatattactggtacatcttccacatgccaggccctgcaaagtgctggggagataccatggttttcctggagctggtatttttggggtggagggaacccaccctgaataaataaagtaacccaataaataaagaagatgatttcgaaaaaaaaaaaaaaaaaaaaaaaaaaaaa

SEQ ID NO: 211 - DNA, 437 bp, Homo sapiens
  modified_base (396)..(396): a, c, t or g
  modified_base (434)..(434): a, c, t or g
cttcttacaggtttcagtctacatgttacttccttgagaagcagtgtttgacacccttctcccccaatccagccatcccccaagtctgagttaggtatttctcttctgtattcccatagcacagtgtaattcccctataatagcatgtatcaccttgaattatgggtgtttattgttctgtctctcctgttagaacgaaagctccatgaagggattgtcattttattcaccagtgtaccctctatgcccagcacaacttttggtcatattaaacaaagaatgaataaataaatccaagagcataggaggaggagcatccaaatgagcctgaaaaattagagaaatatttgtagtagtatgtgatatcttaggctgagcttaacaagtataatgagntccaagagttttgggttgaaaatgaggtactccagggntta

SEQ ID NO: 212 - DNA, 3578 bp, Homo sapiens
acttccggacgggactcccctctgtccgcgcctcacatctccccttcctctcgcctagtcctgtgccgttttccgtccgcgactcttccggcccagagctttcggagtgcggttgctcaggggaagccgtcgccgcccccgcctcggggccgagtgagagtgcccgtcgcgtcgcgccgcgtcgccccccgggccgcctccttgccgccagtggcgggctccgttctccctcgaagcactccccccagctccatgaatggaaatcggctccgcaggacccgctggggcccagcccctactcatggtgcccagaagacctggctatggcaccatgggcaaacccattaaactgctggctaactgttttcaagttgaaatcccaaagattgatgtctacctctatgaggtagatattaaaccagacaagtgtcctaggagagtgaacagggaggtggttgactcaatggttcagcattttaaagtaactatatttggagaccgtagaccagtttatgatggaaaaagaagtctttacaccgccaatccacttcctgtggcaactacaggggtagatttagacgttactttacctggggaaggtggaaaagatcgacctttcaaggtgtcaatcaaatttgtctctcgggtgagttggcacctactgcatgaagtactgacaggacggaccttgcctgagccactggaattagacaagccaatcagcactaaccctgtccatgccgttgatgtggtgctacgacatctgccctccatgaaatacacacctgtggggcgttcatttttctccgctccagaaggatatgaccaccctctgggagggggcagggaagtgtggtttggattccatcagtctgttcggcctgccatgtggaaaatgatgcttaatatcgatgtttctgccactgccttctacaaagcacaacctgtaattcagttcatgtgtgaagttcttgatattcataatattgatgagcaaccaagacctctgactgattctcatcgggtaaaattcaccaaagagataaaaggtttgaaggttgaagtgactcattgtggaacaatgagacggaaataccgtgtttgtaatgtaacaaggaggcctgccagtcatcaaacctttcctttacagttagaaaacggccaaactgtggagagaacagtagcgcagtatttcagagaaaagtatactcttcagctgaagtacccgcaccttccctgtctgcaagtcgggcaggaacagaaacacacctacctgccactagaagtctgtaatattgtggcagggcaacgatgtatcaagaagctaacagacaatcagacttccactatgatcaaggcaacagcaagatctgcaccagatagacaagaggaaattagcagattggtaagaagtgcaaattatgaaacagatccatttgttcaggagtttcaatttaaagttcgggatgaaatggctcatgtaactggacgcgtacttccagcacctatgctccagtatggaggacggaatcggacagtagcaacaccgagccatggagtatgggacatgcgagggaaacaattccacacaggagttgaaatcaaaatgtgggctatcgcttgttttgccacacagaggcagtgcagagaagaaatattgaagggtttcacagaccagctgcgtaagatttctaaggatgcagggatgcccatccagggccagccatgcttctgcaaatatgcacagggggcagacagcgtagagcccatgttccggcatctcaagaacacatattctggcctacagcttattatcgtcatcctgccggggaagacaccagtgtatgcggaagtgaaacgtgtaggagacacacttttgggtatggctacacaatgtgttcaagtcaagaatgtaataaaaacatctcctcaaactctgtcaaacttgtgcctaaagataaatgttaaactcggagggatcaataatattcttgtacctcatcaaagaccttctgtgttccagcaaccagtgatctttttgggagccgatgtcactcatccacctgctggtgatggaaagaagccttctattgctgctgttgtaggtagtatggatgcacacccaagcagatactgtgccacagtaagagttcagagaccccgacaggagatcatccaggacttggcctccatggtccgggaacttcttattcaattttataagtcaactcggttcaagcctactcgtatcatcttttatcgggatggtgtttcagaggggcagtttaggcaggtattatattatgaactactagcaattcgagaagcctgcatcagtttggagaaagactatcaacctggaataacctacattgtagttcagaagagacatcacactcgattattttgtgctgataggacagaaagggttggaagaagtggcaatatcccagctggaacaacagttgatacagacattacacacccatatgagttcgatttttacctctgtagccatgctggaatacagggtaccagtcgtccttcacactatcatgttttatgggatgataactgctttactgcagatgaacttcagctgctaacttaccagctctgccacacttacgtacgctgtacacgatctgtttctatacctgcaccagcgtattatgctcacctggtagcatttagagccagatatcatcttgtggacaaagaacatgacagtgctgaaggaagtcacgtttcaggacaaagcaatgggcgagatccacaagctcttgccaaggctgtacagattcaccaagataccttacgcacaatgtacttcgcttaaatagtccaagtatattctctgagaggaagtactgaaagatgaattgacatacaacgtatgtttccagtgaagtcaattgagtaaggacacctccagccatacagaaaccaacactgtgtgggggccaaggtctgatccttatgttaatacaaggaagattgtttacttcatcaaggaacacagcatcattatgcaatatgaaaccagccaactgctttttgtgcggtctcctataggaagtatcgcaattgttttgttttcatttcttgtagtctaacccttttaatgcctttacctcaagttgcttggcagcacaactatctttgcaaaaaaaagtaaagaaaaagtaaatgatggtttaaaaaatacacaccttcatgaataatcaaagtgatttttcagaattatgtgtgcaaaaaattaatgtgcattcatatattcttgtaaaaggtgtctgtgtatttttaaaatatatacatccatacttcatatgcatatatatctagatctggattgataatagatatatatgtgtctgttatatattttagagttcattccattggggaattttctttcccttttattctacccccactaccgcctttatttctctatttcccttgccttcatcacctacatttttttcccagtcctaccagtgacattcaaatgttgatgtatctggttcgtttgaatataaaatatggcaaactaaaaaaaaaaaaaaaaaaaaaaa

SEQ ID NO: 213 - DNA, 391 bp, Homo sapiens
  modified_base (75)..(75): a, c, t or g
  modified_base (210)..(210): a, c, t or g
  modified_base (262)..(262): a, c, t or g
  modified_base (264)..(264): a, c, t or g
  modified_base (314)..(314): a, c, t or g
  modified_base (324)..(324): a, c, t or g
  modified_base (333)..(333): a, c, t or g
  modified_base (340)..(340): a, c, t or g
  modified_base (347)..(347): a, c, t or g
  modified_base (361)..(361): a, c, t or g
caacagccattacatttttattcagtactaggacttgttgaagggattacaaaagacctatttccactatttggnatcttcaaagaccatataatttggtcatggagttcatactggcattcaggaaaggaaaagtaataatacatacagttgggataacaaaatgtgtgggcatcaacaaagttctattcccacagaacttcagagganggagggagatcagtgttaactaggactaggcagggtaagggcttcacagganantgtgggtttgggggactttgaggatgggtattgagggttatctattgccntataaccaanccctccccnaaacttnggtggcngtaggtggcctggnccccattttttttttttttttgggggggtt

SEQ ID NO: 214 - DNA, 313 bp, Homo sapiens
  modified_base (32)..(32): a, c, t or g
  modified_base (90)..(90): a, c, t or g
  modified_base (276)..(276): a, c, t or g
gctggaatctgcccacccccgcatgggtgttngctgccgcctgagccgggccttgctcactgctgtcaccaacgtgctcatcttcttctngtgcttggcttttttgtgggggctcctaattctcctaaaatatcggtggcgaaagttagaagaggaggaacaagccatgtatgagatggtgaagaagattatagacgtggtccaggaccattacgtggactgggagcaggacatggagcgctatccatatgtaggcatcctgcacgtgcgcgacanttggatccctccacagagccggagcatttgtaagcgt

SEQ ID NO: 215 - DNA, 2988 bp, Homo sapiens
gccatggccggcctgtcggacctggaactgcggcgggagctgcaggccctgggcttccagccaggacccatcaccgacaccacccgggatgtctaccgcaacaagctgcgccgcctgcggggcgaggcccggctgcgcgacgaggagcggctgcgggaggaggcccggccgcggggcgaggagcggttacgggaagaggcccggttacgcgaggatgcgccgctgcgcgcccggcccgccgcggcctctccgcgggcggagccctggctctcccagccggcctcgggctcggcctacgcgacccctggggcctacggtgatatccggccctccgcggcttcctgggtagggagccgcggcctcgcctatcctgcccgcccggcgcaactcaggcgccgcgcctcggtccggggcagctccgaggaggacgaggacgcccggacgcccgacagggccacgcagggcccgggtctcgcggcccgccgctggtgggcagcgtctcccgccccggcgcggctgccttcctccctcctcggtcccgacccgcgcccgggcctgcgggcgactcgagcgggccctgctggcgcggcgagggcccggcctgaggtggggcgccggctggagcgctggctctctcggcttctgctctgggccagcctagggctactgctcgtcttcctgggcatcctttgggtgaagatgggcaagccctcagcgccgcaggaggcggaggacaacatgaagttattgccagtggactgtgagagaaaaacagatgagttctgtcaggccaagcagaaggcagccttgctggagctgctgcatgaactctacaatttcctggccatccaagctggtaattttgagtgtggaaatccagagaatctaaaaagcaaatgcattcctgttatggaagcccaagaatatatagccaatgtgaccagcagctcctccgccaagtttgaagccgcactgacctggatactgagcagtaacaaggacgtgggcatctggttgaaaggagaagaccagtctgaattggtgacgactgtggacaaggtggtctgcctggaatctgcccacccccgcatgggtgttggctgccgcctgagccgagccttgctcactgctgtcaccaacgtgctcatcttcttctggtgcttggcttttttgtgggggctcctaattctcctaaaatatcggtggcgaaagttagaagaggaggaacaagccatgtatgagatggtgaagaagattatagacgtggtccaggaccattacgtggactgggagcaggacatggagcgctatccatatgtaggcatcctgcacgtgcgcgacagcttgatccctccacagagccggaggcgcatgaagcgtgtctgggaccgagctgtggagttcctggcctccaacgaatcccggatccagacggagtcccaccgcgttgcaggagaggacatgctggtgtggagatggactaagccctcttccttctctgactcagagcgataagccccgggcggggacttgttcctggtcagcctgtcccaggacagcccactccagaggcacaggagggtcaccaggcctgcggtgctgaattcacacttgccttgactttcagtctcgtcctgacacgattccaaaggtctgccatactcttcagaggagttcggctcgcaggaaaatgtgggcttcctttaaagggagggggagaagccagggtgatagcccagactctgccctgttgtgctggcagaaacggggagaagggttgagttttcatgaatagaaaacaagagcagcagctgtcaggcccagctgacaagcgtggggctggtgggctggggcatggccacgccagggagtctgtcacctgggaggtggggcaaggatggtgtttcgggtggcgggatggggagcagcttggtccatgtgccttcagggggttgttacctgagagctccagggtgaagggagaaagcctgtgctctggctggctgggcctctatcctgaagagggaaggtgctagaaattagaacaagtgactgtaggggggaccgtctagaaacaccaggcccagacacacggtccctcaggtcaggaggagtgagcagccggcacagcctcctgggaggatcccgaagtagggactggggctgagagcagagaggagggtcgggcgggcccgcctcagtgttgcttctcacagaagctgcgactctagaccaggcctgcagccagaacgccgattccgggagcttgggagccctgcgtcagggcccagagcctcgcacttgctgtgtgcgaagatcgccttgctttactgtgaccacagccccgacgcggggctgtttaacaagaacttcagcgcagccggcgtttctgttaccccggccgcggctcttggcggcgggagaggcgcagtggctgcaggctgccccctgccggccacaagggagcagcgtccgcgccgccgcccaccggccctcccgccagctcctcagcctgctccctgggaggcaggctccagaagcaccccgacggggggccttattaagtgcgagaagcctctccagcgagtcttccccgtgtgtcctcatctgcggcaggcaggagagggggagcaaacaggaaattccacagctgcctccagaaacattaaccacccctctctagtcttactggtattttttgtttccttaataaagctccagtctccctcatttgagcaatactctcatttcctctgatgtctggatgatcggcagggcaggaatctgagcgctggccccgtggtgaggccatgttctcataatcaggctccagccagaaaaataagaaacaccgcaacaggcttcagtatcagggctgaaactgctggatgaataaactatttattaaaaacggaaaaaaaaaaaaaaaaaaaaaaaaaaaaaaaaaaaaaaaaaaaaaaaaaaaaaaaaaaaaaaaaaaaaaaaaaa

SEQ ID NO: 216 - DNA, 282 bp, Homo sapiens
  modified_base (9)..(9): a, c, t or g
  modified_base (47)..(47): a, c, t or g
  modified_base (207)..(207): a, c, t or g
  modified_base (212)..(212): a, c, t or g
  modified_base (275)..(275): a, c, t or g
tgggctganaaggcccaaacacttataaaccaaagctgcaggtctcnaaggtcttcagagaagctacacaaaatactatgatttcattagcatccacatatgtatcattttccacaacattttacaattctcttgtttcacagggaaggtgaactaattataatgaaatatcagtaatgtatcttaaataagtaacatgttgctggnaaaantttaagttaaaatgcactacataatagtgcaggaaacaaagtgcaggtgggcaattttaaggncatggaa

SEQ ID NO: 217 - DNA, 247 bp, Homo sapiens
  modified_base (239)..(239): a, c, t or g
ggtcgattttaatacgaatcctttttcttgtagaggtaagtaaaatcttcctgacaaggtagtcctcttttcacggcacagacaatgggctttctgtttatgaggggtgagaagtgatgtttgttactatgttctccagcaagtaaacattcctctgctcacctcccaacaagactaacagtctttttagaagtaaatatattcaagacaaacgagaaaatcctggctacccaagtcgngtatatac

SEQ ID NO: 218 - DNA, 3848 bp, Homo sapiens
gttttcgggaagatggcggctatcgaagcggctgcagagccggtaacggtggtggcggctgttgggccaaaggcgaaagacgaagaggaggaggaagaggagccgctgccaccgtgcgaggcggtgcgctgggccccagttggggcggtggcggaggcccggcctggggcaaccgcgtttttagaagaggcgacggccgaggagcctggcgcggccccgggctccccgccggattcgccgggccggacgctgcggcggctgcgggcagagcggcggcggctggactcggcgctgctggcgctgtcctcgcacttcgcgcaggtgcagttccgcctgcgccaggtggtgcgcggggcgccggcggagcagcagcgccttctgcgggagctcgaagacttcgccttccgcggctgccctcacgtcctaggttacgaagggcccggcgaccccgccagcgatgagggcgatgggctgccaggggaccggccacggttgcggggcgaggaccagagtgagcaggaaaagcaagagcgtctggaaacccaaagggagaagcagaaagaactgatactgcagctcaagacccagctagatgacctggaaacgtttgcctatcaagagggcagttatgactcgctgccacagtccgtggtgttggaaagacagcgggtgatcatagatgagttaataaagaaactggacatgaatctgaatgaggacatcagttccctgtccactgaagagcttcgtcagcgtgtagatgcagcagtggctcagatcgtcaacccagcccgagtcaaagaacagttggttgagcaactgaaaactcagatccgagaccttgagatgtttatcaacttcatccaagatgaagtgggaagccccttgcagacaggtggtggacactgtgagtgcaaggccggtgggaagacaggaaatggctgcagcagaacaggcagcagcagaacgcctccaggaaacagcaaaacaaaggcagaggatgtgaagaaagtccgggagacggggctgcacctgatgcggcgagcgctggccgtgctccagatctttgctgttagccagtttggttgtgccacaggccagatccctccaaccctgtggcagagggtccaggctgacagagactactctcccttgctgaagaggctggaggtgtcagtggacagagtgaagcagctagccatgaggcagcagccacatgaccatgtcatcacctctgccaacctccaggacctctctctgggaggcaaggatgagctgactatggctgtgcggaaggagctaacggtggctgtgagggacctgctggcccatggactgtatgcctcctccccagggatgagccttgttatggctcctattgcttgtttgctgccagccttctcctcggccccagaggccatgcacccgtgggagctctttgtaaagtactaccatgctaagaacggccgtgcttatgtggaatccccagcccggaagctctcccagtccttcgcccttcctgttacgggaggcactgttgtcacccccaaacagagcctactgacagccatccacatggtgctgacagagcatgacccttttaagcgcagtgcagactcagaattgaaggccttggtgtgcatggcactgaatgagcagcgtctggtgtcctgggtgaacctcatctgcaagtccgggtcactcatcgagcctcactaccagccctggagctacatggcacacacaggctttgagagtgccctcaacctgctcagtcgcctcagcagcctcaagtttagcctccctgtagatctggctgtgcgccagctcaaaaacatcaaagatgccttttgatgagagtgccctaaccccagacaagctccttgttcagtagggatagatgtgctagtcttctagcataggagcaaggaatcagaggtggggttaaaggcatttttcccagaccctgctcaggcagtcggccaaatgagtgcaaagtctgttttccccaccaacttagctctcggaaagatgtgctggagggaccctcttgttaagaaggttctgccaggccgggcgcggtggctcacacctgtaatcccagcactttgggaggccgaggcgggcggatcacaaggtcaggagttcgagaccatcctgtctaacacggtgaaaccccatctctactaaaaatacaaaaaaattagtcggacatggtggcaggcacctgtagtcccagctactcgggaggctgaggcaggagaatggcgtgaacccaggaggcggagcttgcagtgagccaagatcgcgccactgcactccagcctgggcgacagagtgagactccgtctcaaaaaaaaaaaaagaaggttgtacccacagtatacgtgtgggcacttgtgcttgagcctgtattaaaggaatcaggccaggcacagtggctcacgcctgtaatctcagcacattgggaggctgaggtgggcggatcacctgaggtcaggagttcaagaccagcctggccaacatggtgaaaccccatctctactaaaaatacaaaaattagctaggcggggtagtgcatgcctgtaatcccagctactcaggaggctgaggccggagaatcgcttgagcccgagaggtggagactgcagtaagccaagatcatgccactgcactccagcctgggcaacacagggagactccatctcaaaaaaaaaaaaaaaaaaaaaaaaagacattcaacttgaggctcctgttagttaagctatcttctttcacttgaagcaggtttgagaggcctaggccagaatttaaattccttttatgaatagatttccctttcttcctgaccccaaggtcagaggagactatatattccatggctgcctctaagactaggaataggaatatctgaaaacagcatttctaagggtggtaaccacaggtcgattttaatacgagtcctttttcttgtagaggtaagtaaaatcttcctgacaaggtagtcctcttttcacggcacagacaatgggctttctgtttatgaggggtgagaagtgatgtttgttactatgttctccagcaagtaaacattcctctgctcacctcccaacaagactaacagtctttttagaagtaaatatattcaagacaaacgagaaaatcctggctacccaagtcgagtatatacaggaatacaaatcggtaaccagcagctgttcctcaggttgtgactcactgagcgccacttgtcctggaggctggatgatggaggacatctggttataggtactgtagcagggataggtgccacaggaggataggaactacagcagatcgctgtttccagaacggggaggagtatctcattgtgaaacagactctagagtggttctatttggtcttcagtgttttagcctcattagttcatatttggcatgcagcttgtggtgagtactgttctaggactggccaaaaatgggcaaaatgtatcactccaaacactactgattcagcattgttttcatgtcttaaaattgccacctgcactttgtttctgcactattatgtagtgcattttaacttaaattttttccagcaacatgttacttatttaagatacattactgatatttcattataattagttcaccttccctgtgaaacaagagaattgtaaaatgttgtggaaaatgatacatatgtggatgctaatgaaatcatagtattttgtgtagcttctctgaagaccttagagacctgcagctttggtttataagtgtttgggccttatcagcccatctgatccagatcaatatttttttgaaaactgaaaaaaaaaaaaaaaa

SEQ ID NO: 219 - DNA, 415 bp, Homo sapiens
  modified_base (1)..(1): a, c, t or g
  modified_base (16)..(18): a, c, t or g
  modified_base (343)..(343): a, c, t or g
  modified_base (350)..(350): a, c, t or g
  modified_base (395)..(395): a, c, t or g
ntttttttactttacnnnattttaataacaatggtacccaattcattaacaaatgaatttaggcaatgtgctttgctctacaatccatcagatacattttcactgcagatagttcagaaatcattttggaaatagacacaaacatgtacatattcatttgctgaaaatgccacttacagctttaatatcaaatatagttatcatagttcacagaaaaagtataaagtgcaaaagctccacttcaaaaggccttaagtcactcccaaagcaatgaggattaaattttaccacagccagtgggcatgccacccttatgtaggggcacctacataagggtataaancaagggnatatatctgaaaacactatattgctctggattacatattgtgggntataaaataggttttaaatc

SEQ ID NO: 220 - DNA, 400 bp, Homo sapiens
  modified_base (329)..(329): a, c, t or g
  modified_base (365)..(365): a, c, t or g
gtcatcaaacacaaggctttgtaaaaatacgaccacctattccacttactggatctgtcaggtgtgtaaaacttctctcgccagttcatcatgcttccatgagccctcaggactgggatttgagccttcctggctctttatcccttggggcagacatggaaccatctctgagggaccaggtggatgctgaagctcacccagtcagggcccctctcctagctccttttacactgaaattaatctgaaagctttcatagccaaggctttgctaggtgctattattccagctggccaaagagaagtcttgggccagattgggattctcaatngattttatagacataattcccctgcaaacttaaaanaatatataaccccttactttataggactaattgtt

SEQ ID NO: 221 - DNA, 471 bp, Homo sapiens
  modified_base (33)..(33): a, c, t or g
  modified_base (327)..(327): a, c, t or g
  modified_base (437)..(437): a, c, t or g
agtttgtttctttatttggagcagagacatgancaattcacaaattcactgtgctattttgacagaaccccatgttttgaattcaaatcatttttttacaccaaaagaacaaacacagctagtagagtagttaattctatgtttggggcaagagaactaaagatgggaatagagtatcttgtaagccagtggtccccaacctttttggcaccagggaccggttggtttcatggaagacaatttttccgcagattgggatgggggtatggtttcaggatgaaactgttccacctcagatcatcaggcattagattcttacaaggggtntgcaacctagatcccacacacgcggcaattcacaattggggttcatgctcccatatggaggaatctaacaagggctggctaatccgacagggggcagagcttcaggtggnaattgtgagcaacggggagcagctttaaacctta

SEQ ID NO: 222 - DNA, 419 bp, Homo sapiens
  modified_base (336)..(336): a, c, t or g
  modified_base (363)..(363): a, c, t or g
tggtctctttagttggactccggtgctattttcctcagtatatttgatggtctaccacaggggtccccaacccctgagccacagaccagtgtgagtccgtggcctgttaggaactggcctgcacagcagtggagcagcagttgagtgagcgaaactccatctatgtttacagctgctccccgttgctcacattaccacctgagctctgcctcctgtcggattagcagccttgttagattctcatatgggagcatgaacccaattgtgaattgcgcgtgtgtgggatctaggttgcacaccccttgtaagaatctaaatgcctgatgatctgaggtnggaacagttttcatcctggaaaccatnacccccattcccaatctgcgggaaaaattgttttccatggaaaccaaccggttcct

SEQ ID NO: 223 - DNA, 420 bp, Homo sapiens
  modified_base (4)..(4): a, c, t or g
  modified_base (200)..(200): a, c, t or g
  modified_base (233)..(233): a, c, t or g
  modified_base (261)..(261): a, c, t or g
  modified_base (412)..(412): a, c, t or g
aaanctaaaaaaatgattctttattttgttcaattgaccaatttgtttatgtaattatatgtgataacaaaatatataacacattaatgatatgttattatgtgactcacttgattaaaaaacatttaaaatatatttatcattatgaaaccaaaaactatgacattgaaaatcttgaataaagtcttatgacacttttnctgtaatagcattttatattctacataaaattngccttgaaccaaggcacagctggcaggnaaacagatggggaatgtatccctcaatcttcagcctcttgctcagaacaagactgggtgagctgctcccgttgtcacccaacactgtgacacacacagcctgcaccagttccttccgtgcttcccacagaatcaggggcacaccttctccngtctccgg

SEQ ID NO: 224 - DNA, 460 bp, Homo sapiens
  modified_base (345)..(345): a, c, t or g
  modified_base (364)..(364): a, c, t or g
  modified_base (375)..(375): a, c, t or g
  modified_base (388)..(388): a, c, t or g
  modified_base (403)..(403): a, c, t or g
gagatctttcctcttcacatgtgctcctcctctgatgtgccccaccccagtgcaagggcagcaccttccacccatcacccaagccagagacacagttggcacaatggacttctccctgcctttactccccatctccaagctgtcttcccacacagctcagattcattccaaatggcctatcttttatggaccagtcactcctcacctggtcggtgtagcacgcacggaatttcttggactttggctccgtcttagagcaacccacctctcccctctgcactgctgctgggagtcagcttcctagaaccctgatgctatcctctcactttccctagccagggactncctttcccaagccagcctntgcctttcctntggccttcctttnacgtagggaaatctntatgtgatttccagagattctggggggacaagagaaggtgtggcctgattttgttgg

SEQ ID NO: 225 - DNA, 3362 bp, Homo sapiens
cctttttgcaaatggtagttgatttttgcagaaggtttgtggccagatcgctatgtataatactgatgaagcatttttgttccagctctgtctcggaagacctaggctgtagacgtggggatttcagtaggaaacattatggatctgtggagctgcttatttccagtgatgctgatggagccatccaaagggctggaagattcagagtggaaaatggctcttcagatgagaatgcaactgccctgcctggtacttggcgaagaacagacgtgcacttagagaacccagaataccacaccagatggtatttcaaatattttttaggacaagtccgtcagaactacattggaaacgatgccgagaagagccctttcttcttgtccgtgaccctttctgaccaaaacaatcaacgtgtccctcaataccgtgcaattctttggagaaaaacaggtacccagaaaatatgccttccctacagtcccacaaaaactctttctgtgaagtccatcttaagtgccatgaatctggacaaatttgagaaaggccccagggaaatttttcatcctgaaatacaaaaggacttgctggttcttgaagaacaagagggctctgtgaatttcaagtttggggttctttttgccaaagatgggcagctcactgatgatgagatgttcagcaatgaaattggaagcgagccttttcaaaaatttttaaatcttctgggtgacacaatcactctaaagggctggacgggctaccgtggcggtctggataccaaaaatgataccacagggatacattcagtttatactgtgtaccaagggcatgagatcatgtttcatgtttccaccatgttgccatattccaaagagaacaaacagcaggtggaaaggaaacgccacattggaaacgatatcgtcaccattgtgttccaagaaggagaggaatcttctcctgcctttaagccttccatgatccgctcccactttacacatatttttgccttagtgagatacaatcaacaaaatgacaattacaggctgaaaatattttcagaagagagcgtaccactctttggccctcccttgccaactccaccagtgtttacagaccaccaggaattcagggactttttgctagtgaaattaattaatggtgaaaaagccactttggaaaccccaacatttgcccagaaacgtcggcgtaccctggatatgttgattagatctttacaccaggatttgatgccagatttgcataagaacatgcttaatagacgatcttttagtgatgtcttaccagagtcacccaagtcagcgcggaagaaagaggaggcccgccaggcggagtttgttagaatagggcaggcactaaaactgaaatccattgtgagaggggatgctccatcaagcttggcagcttcagggatctgtaaaaaagagccgtgggagccccagtgtttctgcagtaatttccctcatgaagccgtgtgtgcagatccctggggccaggccttgctggtttccactgatgctggcgtcttgctagtggatgatgaccttccatcagtgcccgtgtttgacagaactctgccagtgaagcaaatgcatgtgcttgagaccctggaccttctggttctcagagcagacaaaggaaaagatgctcgcctctttgtcttcaggctaagtgctctgcaaaagggccttgaggggaagcaggctgggaagagcaggtctgactgcagagaaaacaagttggagaaaacaaaaggctgccacctgtatgctattaacactcaccacagcagagagctgaggattgtggttgcaattcggaataaactgcttctgatcacaagaaaacacaacaagccaagcggggtcaccagcacctcattgttatctcccctgtctgagtcacctgttgaagaattccagtacatcagggagatctgtctgtctgactctcccatggtgatgaccttagtggatgggccagctgaagagagtgacaatctcatctgtgtggcttatcgacaccaatttgatgtggtgaatgagagcacaggagaagccttcaggctgcaccacgtggaggccaacagggttaattttgttgcagctattgatgtgtacgaagatggagaagctggtttgctgttgtgttacaactacagttgcatctataaaaaggtttgcccctttaatggtggctcttttttggttcaaccttctgcgtcagatttccagttctgttggaaccaggctccctatgcaattgtctgtgctttcccgtatctcctggccttcaccaccgactccatggagatccgcctggtggtgaacgggaacctggtccacactgcagtcgtgccgcagctgcagctggtggcctccaggtcggatatatacttcacagcaactgcagctgtgaatgaggtctcatctggaggcagctccaagggggccagtgcccgaaattctcctcagacacccccgggccgagatactccagtatttccttcttccctgggggaaggtgaaattcaatcaaaaaatctgtacaagattccacttagaaacctcgtgggcagaagcatcgaacgacctctgaagtcacccttagtctccaaggtcatcaccccacccactcccatcagtgtgggccttgctgccattccagtcacgcactccttgtccctgtctcgcatggagatcaaagaaatagcaagcaggacccgcagggaactactgggcctctcggatgaaggtggacccaagtcagaaggagcgccaaaggccaaatcaaaaccccggaagcggttagaagaaagccaaggaggccccaagccaggggcagtgaggtcatctagcagtgacaggatcccatcaggctccttggaaagtgcttctacttccgaagccaaccctgaggggcactcagccagctctgaccaggaccctgtggcagacagagagggcagcccggtctccggcagcagccccttccagctcacggctttctccgatgaagacattatagacttgaagtaacagagttgaatctcatttgccatctttagttttcttatggaggtttatactctttaaacagttctgatgtaatttctcaacaaaatgtggcttttagcctgtcagtgatctattggaccaaaccttctgcacactcggccagttccctctccaatgtccggtgccatctttcctgacctttgtttctttctgttcaggaaccatcagtccccttgtaataaaggtggtagatttcattgaggttttagattgaaactttgaataaatcaaaaatactcattcttatttactgcaaaaaaaaaaaaaaaa

SEQ ID NO: 226 - DNA, 407 bp, Homo sapiens
  modified_base (7)..(7): a, c, t or g
  modified_base (79)..(79): a, c, t or g
  modified_base (86)..(86): a, c, t or g
  modified_base (361)..(361): a, c, t or g
  modified_base (378)..(378): a, c, t or g
  modified_base (391)..(391): a, c, t or g
  modified_base (397)..(397): a, c, t or g
agttttnacaagttacagaaaacgcaaattttcatagcatcaattttagaaaagaaagattaaggttcccatctgcggngcttttnccaatctgcccatcacccgtccctctgaagaagcacgcacactccagatgtctccttcattgatcacatttctctctggctgtctctattcctaagtcagagttactcttgctgctgctgctgctgctgctgctgctgctgctgctgctacgggggggggcggcggcggtgggtgggcggtggctgccgaggcctcatgggttgtcagctccatgcctcctgaactttcactccactgaaatcctatataaaggcacccagttcagcagggcctntgcgggaacaggaaatngactcctgagggnaaggtnggggggcccg

SEQ ID NO: 227 - DNA, 419 bp, Homo sapiens
  modified_base (92)..(92): a, c, t or g
  modified_base (141)..(141): a, c, t or g
  modified_base (148)..(148): a, c, t or g
  modified_base (151)..(151): a, c, t or g
  modified_base (229)..(229): a, c, t or g
  modified_base (314)..(314): a, c, t or g
  modified_base (375)..(375): a, c, t or g
  modified_base (400)..(400): a, c, t or g
  modified_base (409)..(409): a, c, t or g
taagggttttatttctaacaagaggaaaataataaaataaaattaaaataggcttcagttggaaccaagtttcttgttttgctttttttttncttttgaacaaattaattacacaccaacaatcttcttttattacaacangaacccnggnggaggaaaggagacaggggaggacagggagggaggactgaggtggttgtgaggacaagcaccaaaagctttcttcagntcacagggagccctgttcagctccccagccaaattcctttaaaataaaaaactgtgagcacggctatctgaagtttcctcctccngggggtgggaacagtcaggggggaggggagaggggagaaggggggtagggagctttggggncaaacattggcatgccccatggctnacacagttnatccccgtac

SEQ ID NO: 228 - DNA, 155 bp, Homo sapiens
  modified_base (122)..(122): a, c, t or g
  modified_base (137)..(137): a, c, t or g
atagcattatttttataggaaatatttcatgtcccttaaatattctttgttagttatagggatggacagtttatgttaagcacttagcttaaacaatccgtttatattagcactgtatcccnggtgccatccaacantttgtatgtttttgtaaa

SEQ ID NO: 229 - DNA, 7723 bp, Homo sapiens
atgccgctggcgcagctggcggacccgtggcagaagatggctgtggagagcccgtccgacagcgctgagaatggacagcaaattatggatgaacctatgggagaggaggagattaacccacaaactgaagaagtcagtatcaaagaaattgcaatcacacatcatgtaaaggaaggacatgaaaaggcagatccttcccagtttgaacttttaaaagtattagggcagggatcatttggaaaggttttcttagttaaaaaaatctcaggctctgatgctaggcagctttatgccatgaaggtattgaagaaggccacactgaaagttcgagaccgagttcggacaaaaatggaacgtgatatcttggtagaggttaatcatccttttattgtcaagttgcattatgcttttcaaactgaagggaagttgtatcttattttggattttctcaggggaggagatttgtttacacgcttatccaaagaggtgatgttcacagaagaagatgtcaaattctacttggctgaacttgcacttgctttagaccatctacatagcctgggaataatttatagagacttaaaaccagaaaatatacttcttgatgaagaaggtcacatcaagttaacagatttcggcctaagtaaagagtctattgaccatgaaaagaaggcatattctttttgtggaactgtggagtatatggctccagaagtagttaatcgtcgaggtcatactcagagtgctgactggtggtcttttggtgtgttaatgtttgaaatgcttactggtacactccctttccaaggaaaagatcgaaaagaaacaatgactatgattcttaaagccaaacttggaatgccacagtttttgagtcctgaagcgcagagtcttttacgaatgcttttcaagcgaaatcctgcaaacagattaggtgcaggaccagatggagttgaagaaattaaaagacattcatttttctcaacgatagactggaataaactgtatagaagagaaattcatccgccatttaaacctgcaacgggcaggcctgaagatacattctattttgatcctgagtttactgcaaaaactcccaaagattcacctggcattccacctagtgctaatgcacatcagctttttcgggggtttagttttgttgctattacctcagatgatgaaagccaagctatgcagacagttggtgtacattcaattgttcagcagttacacaggaacagtattcagtttactgatggatatgaagtaaaagaagatattggagttggctcctactctgtttgcaagagatgtatacataaagctacaaacatggagtttgcagtgaagattattgataaaagcaagagagacccaacagaagaaattgaaattcttcttcgttatggacagcatccaaacattatcactctaaaggatgtatatgatgatggaaagtatgtgtatgtagtaacagaacttatgaaaggaggtgaattgctggataaaattcttagacaaaaatttttctctgaacgagaggccagtgctgtcctgttcactataactaaaaccgttgaatatcttcacgcacaaggggtggttcatagagacttgaaacctagcaacattctttatgtggatgaatctggtaatccggaatctattcgaatttgtgattttggctttgcaaaacagctgagagcggaaaatggtcttctcatgactccttgttacactgcaaattttgttgcaccagaggttttaaaaagacaaggctatgatgctgcttgtgatatatggagtcttggtgtcctactctatacaatgcttaccggttacactccatttgcaaatggtcctgatgatacaccagaggaaatattggcacgaataggtagcggaaaattctcactcagtggtggttactggaattctgtttcagacacagcaaaggacctggtgtcaaagatgcttcatgtagaccctcatcagagactgactgctgctcttgtgctcagacatccttggatcgtccactgggaccaactgccacaataccaactaaacagacaggatgcaccacatctagtaaagggtgccatggcagctacatattctgctttgaaccgtaatcagtcaccagttttggaaccagtaggccgctctactcttgctcagcggagaggtattaaaaaaatcacctcaacagccctgtgaagtgacctcagtgagatatttggtaccatggtgtaagctgatagcacaagttctggcgacaggtagcacgtatctgagagacacctgcaagcacacactgtcccagctggtacccataatgctgctgttcctgctgctgctcctgctttcctctcttctcgctttaaatgattgttagcaagttagattttcctggagcttcggaagaaatgaaaatggaaacatgatgaagatatagtcactgaatcaatgagaaaaataatgaacatatgaataccacctaaaaatacactgaataaagtacaccatatagcattatttttataggaaatatttcatgtcccttaaatattctttgttagttatagggatggacagtttatgttaagcacttagcttaaacaatccgtttatattagcactgtatcccttgtgccatccaacattttgtatgtttttgtaaacagttcatatacagtacatttctgtactgctttctttaatgtatacatgccttgtttaacttggaatctattattattaatcaattgactattaaatctggttaaatagttcacctggattaacagtattgttggacagtcctaaaaatggccagattgtggaacagctgttgaatgtaatacttccaaaatgtacatatctttccccacgtctgtttcactggttcgttcatttgtttgtttcttaaagtcaggtgctctgtcagactaacctagagagctgttatggtagagaaagttatcatatgtgtgtggcatgaaatcaagaatacacctatgaagttagtccatatactttgcaactccttagagtacttttttccttaattaaggaagtagtccttgcacttctaatcttacatagcatccatacttagaatttggcatatcatctgggattttgccaatatacgtcaaagccctttaagagtcatggtaaggagatgggtgaaggaaaatttagcaacaggtaattgaagtcctattggatatttcatgtttaaatagatattctatattaaacactaatttaaatgtaataaaggccaaaggcctctgtatgaaattggatttaaactttcttattttagggaataaaacattattgatcaaacagtatctgttctaacctaaaattataggtagggcaggctaagtgaacagcattgagtattttctgaatccctcatgataatttatagccacatactgcttcctttgacttcaggaatgatcagttttcataatggccactgggcctgcttagattgcagtattcattatctgcatctaatttggtagtttccacaatcgtatttgatgaaagaaacttcagtccccattattacctgtgtctttgccaagctgcctagcatacatcagtatgtaatgtaaaagacatatgagcaagaaaaaagtgatttaacttacctcatcaagaatgtgcccctacaggccgggcgcagtggctcacgcctgtaatcccagcattttgggaggccgaggcaggtggatcacctgaggtcaggagtttgagaccagcctggccaacatggtgaaaccccgtctctactaaaaaatacaaaaattagctgggcatggtggcgtgcacctgtaatcctagctactcaggaggctgaggcaggagaatcgcttgaacctgggaggtggtggttgcagtgagccaagatcacaccattgcactccagcctgggtgacagagtgagactctgtctcaagaaggaaaaaaaaaaaaaagaatgtactcatacagatttttgttagtcatcatgtaataagccatttatatcagaaaccttttttcctgccacagaagctttaaattttcccctaagagtacaaagccaagagagtgtggtttatctaaatgtcctgaaatccacttgtcattccttaatttctcctctatgcaattaaagagaaaggggaaatctataacatttcttttgcccaagtgacacaaaaatgattactgcatagaaatcaaatgtaagtttagcttctaaatgaaataatatataggagggatatcagaatgtctagatagagaaagtattttcaaattcttgaatatatggatgctattaaaagctgctttccattgcctggaaagagagcttttttccctcctctattcagtgtttcaaactttggtcatctcaaattattgtcacttttaaaatgttaatgtcattctgagcagaaatagatatattttcagatttttttacactgatgctactccgtaattgcttaggagtattgtccatcatagtattttagaactagaagtaaacacataaatccttataaattacccaatccaactttctcatattgcatgtagagaacctgagacacatatcaaagtctagaatccttaacttctccccattttgtttttttccgcctcatcacaccatgctgcctttccctcatatgatcaccaaccagtagctgagttcaaaaactacatatttcttgggcagtcctctactggtatgtgatgccaacttttatttctttcgaagataattgccttctttgcctagccaagcagccaattttattggagaaaagcaagttatatgttcacaaaatggaaggctttctacctaaatttatttcatctgtggtcctcttattctcttccattgcttttgacatacagtggaaaaacttggccaacgatgtgctctaaatatagtgcttgtgttgggttaacttttccattaatttctcaacatcaattattcaggcccctacagttgtggtattgaggcccctaaaggcttctgcctttcaccaattagtgctgccagttactgaggcttctcccaaaaggtatcagtccagtcttaaagatatttcattgtgaaagaagaaactaaactatcaggcctcttttacaaaatgagagattgaatttaagcttgtcaagcacgtactggaaggtatgaattacactaccatgtgttttgtatcttccctttcaagtgatgatgttaaatgaaggtaagtttttcatccttttttaatttttgttttttataaatcatttcagctttttctggtttatagaggtgtcttatttctaatgcaacagacccccaactttaacagatttgatatggatgcatttattcacaagcaaccccaaaagtccaaaaatgtaataattttgacaaggcccaaagttgagatgctatgaagcttgtgtgtgtgaaaagtcagttatgattgtctggagagaagctgtggtgtgtatgctgtagagtttccacatttcacatgcagtgtactccaaaaagcgggtttgggtcaaccatttcccatctctttttaagaagtgactgctgttggggccaggggacatcatgggaggtggggctgtccagttagctgtgccctgcaccttcagcccaggaaagatttgaacagagcaaaggcttcaagagagggcagaatgtattcggcagaaaagggactcaggtaagcccagcctgggatgagagcagaaaagcattcaagatttgcaggccttgctatggatgcgcttaatcaccatggaggccagcaatacccatctcagcatggctttgatattctctacttcctggcctttaaaaatgacctataatttttcagtttgctttactatattttataaagaaaattctatcttatggttgattgagcattgagacttatgaaggcattaggatagatagctcaggaatgtaaaggttcagaaaaggtctgttttctcagattaacaaatatgatggattccatggctgaccttggtgcttaaaccaggaggtttcaatctagtcctagagttgtgtccctctgaaaggcccaatgccatgtaactaactttaaactggatatatactttgagccttacttaattcacagataagttgacttaactcagtatttttatttcaattaatgaaaacagtcctcttttcaaccccaggttgcttacattttgctggtctccccaagtgaccattggtggagaccaattaatgaaggaatgaaattcactttattgggactgtggtattcaacagagccacacttaaccactttttccaatgaagaatctccagaatgataatgcccaaatatggatggccaagaagaatttgtatctacggtgtgctttatgtgtttttgacactgctgtattctgtgtgatcaagtgatttgcagctggttccaatgtgactgagtgttctcaaagatttctagtaactaagtcaacttaattttcttaagcctggtattactatcagcctcacatttaccactttgattctagttttttaactgttcataacagggcataccgagggttgggatgagagcctacttcctacctcttaaggcactttcctcattattttgccatataatcttgaactgcatgataagctgtttaaatgtccatgacttctcccagagcaactagcaaagtatatgacattttgaatagagattagtggaaaggaaaatgtagagatttaagttcagaggtacaaacctcaataaaacctccttagagcacataccatgagtagagtatatgtaaacgtatatgagaagagagtcgctataatagtcctctctaagtagattagttcattgtctaatggaagtgaacatctttactcctgttatcaccatagtactgaatgaactgtataatgagtttttcaaacaagtatttaaaatagaactttcacgtacaaagcaagggcataaagattttggtttgtgtttctgtaagtgtagtttaccatctaaagctttggtttttaattttaaaaaaagcttcaaggtattgccattccttagcatccttattgattatgggtgatgagtttttaactcttaaaatcatatacgtgtattagtttatcttaactgttgccctaagcaaaagggaaggtatacacctaagggatgtacttattttgcatttttggtcatgggtgggaatggggtgggtgcctacttaaatagtttttaaaaaagaaaaaaatcacaaatatttttctactgttatatatgatcttcctttatactagtttctctctagtaaggcatgccagaagcccaagataccatatcatgaattcttacatattgtaccttttgttggtggttaaatcgcatcagatgcttggcattgctgccataattataaaatgcttgtaaaggatcaaatatcactaaatactttaaattgttttacttaagagtctaatctgggaagttttcaaatcatactattaatgtgtaatctaagctcttcagatgtatccatgaataatcctggaacaatattgcttgtattcctgtcatagaacaggttttgtaatctttaaaagaaatgaaaatttatataataaagtttcaaatcaatgcaaaaaaaaaaaaaa

SEQ ID NO: 230 - DNA, 408 bp, Homo sapiens
  modified_base (367)..(367): a, c, t or g
  modified_base (380)..(380): a, c, t or g
  modified_base (404)..(404): a, c, t or g
gaggttgaggtgtccgtgttcccggccggacgaccacagcctccagcccccagagctccatgggcacctcaggtcctcccacgaagctgcccgtgcacacctggcccagcgtgaccagaaaggacagccccgaacccagcccacaccctggctccctgttcagcaatgtccgcttcctgctcctggtcctcttggagctgcccctgctcctgagcatgctgggtgccgtcctctgggtgaacagacctcagagaagctctagaagcaggcagaattggcccaagggtgagaaccagtagcatctgctgtccatcaaggccctgtgcttgcaacagagcccttttggggaacttggaatgaccttctngaccatttccttnccggggttgtttttttcaaatttnttgg

SEQ ID NO: 231 - DNA, 1550 bp, Homo sapiens
gaaatggcccagcttggctctgccttctgcagtgtgagtaacacactgaagccagaagctgtgggctgtggggaagtggctgcatcgccacccaagggaccctggactttgccagacgtcagggttgagaggagccactagcaccatcccagagctgtcagcaccggcctcagcccaggcggctctctccctgagcttcctgtaccctgaccctctccagcctcagacctgagacagggctggacaaggaagcagagagcagaagaaaagcagaagcgaagctcagatctgctgggaggagactacattttgtcccctcctggggtcttgcacagtggcaggtgacattcgtgttacaggaatgactgccagggcctgggcctcgtggcggtcttcagctctgctcctcctgcttgtcccaggctattttcctctgagccaccccatgaccgtggcgggccccgtggggggatccctgagtgtgcagtgtcgctatgagaaggaacacaggaccctcaacaaattctggtgcagaccaccacagattctccgatgtgacaagattgtggagaccaaagggtcagcagggaaaaggaatggccgagtgtccatcagggacagtcctgcaaacctcagcttcacagtgaccctggagaatctcacagaggaggacgcaggcacctactggtgtggggtggatacaccgtggctccgagactttcatgatcccattgtcgaggttgaggtgtccgtgttcccggccgggacgaccacagcctccagcccccagagctccatgggcacctcaggtcctcccacgaagctgcccgtgcacacctggcccagcgtgaccagaaaggacagccccgaacccagcccacaccctggctccctgttcagcaatgtccgcttcctgctcctggtcctcttggagctgcccctgctcctgagcatgctgggtgccgtcctctgggtgaacagacctcagagaagctctagaagcaggcagaattggcccaagggtgagaaccagtagcatctgctgtccatcaaggccctgtgctgcaacagagcccctctgggggactggaatgacctcctgaccactccctcccgggctgctctctccacatctcctggaatcctttgtgagcctccttcagccttttccctgtgcccgatcctcatgtgtcacatgtgaacctgacggacatggacgccctgagctgtgagtccacgtctcatgtgcacgccccggccagctaagcctcgggccgtcagcaatacctctgagtgcccggatgccctccctgcacccttccatttctccaggagcctggcactgcttcctccaccgttttcacagggagaagcaggtctaggactcccctgcacctttgccaccataatggcccacactccctgggtccaggagtgtagaatatgcggctgcttccatttgctgagtgtgtcgattcaatgatgctttcaaactttaataaatgacaatgtgtaggccaaaaaaaaaaaaaaaaaaaaaaaaaaaaaaa

SEQ ID NO: 232 - DNA, 322 bp, Homo sapiens
  modified_base (161)..(161): a, c, t or g
  modified_base (219)..(219): a, c, t or g
  modified_base (275)..(275): a, c, t or g
  modified_base (296)..(296): a, c, t or g
tgctatgttgcccaggctgaagtggctactgacaggcacgatgtggcactgcagcctggaactcttgggcttaagtgatccttcctgcttcttctatcttaaaaaaaaaaagttacgcttgcttgttaaaatatttttaaaatgctgtgtttaaactaagnagtaaatatccaccccacctctgacttctaaaaattatctaaagtatgactggtaagntttttacctttaatcccacataagtctaaaatttgtgttcatttccaacaaccaangtgtgtcacttttataccagnattttgtcctgcttatacgtttggta

SEQ ID NO: 233 - DNA, 3775 bp, Homo sapiens
cgtttagtacagaaatctcatgggagagagcatccatgcatttacaaattgttattgaattattttattgaatgatgacacccaaactgagctagaacataattctggctctgctagtacatcttctgtgtgatcttggacaagtcactctactttcctttcaattttcttttctcacagggagataatcataaaaacgactgtaaagtacagcacttcatagagtgctttttgtttaaagagctgacaataaatacgagtctcaaggtctaggaaagcctccctcacaacctgagctgcttgaggacaagggattttcttttgaatcagcagtaccttatttgtgtatctgtgatagagttcctggtacataagaaggtctcaataaatatgtgaatttatgaatattaggcagattgcaaccttgacaggccactgcctcttaaatctcctttctgtgatcttttaatatttaacatctaaaaggccgccgctacttgctttgggataagtatccccggtatgtactttaaaatgcccaagcctagagaaatgattcttgtcttaagggcaccatttcgctctcccaccgtaaagcgccccaggcttgggatctgggtcccaaggctacagggaagagtttggaacgggaagctcatcttccggccctctgattggccggctcgcactccactcacgcggcgcgcagctctgattggcctcggcggcacccctcgtcccgcgactactttgtgtgctggggcggcgcgctccggtcctcccgctcagctggcggtctgggctgctctggggcagcccttcggtccactgctctgcatcgcgggcgccgggaattttccgagtccgagcgggttgctgcttttgctcagaggacatccatgaccctaatggtctttttgttcaagataaagtgattttttgcctttgttgattaactggacaaattcagcatgtagagcgcatgaagtacaggacaataaagcttcctacacatatcaccaggaggatctctttgaaagattcactgcaggactaccagagagaataatttgtctgaagcatcatgtgttgaaacaacagaagtctattcacctgtgcactaactagaaacagagttacaatgttttcaattctttgagctccaggactccagggaagtgagttgaaaatctgaaaatgcggccatggactggttcctggcgttggattatgctcattctttttgcctgggggaccttgctgttttatataggtggtcacttggtacgagataatgaccatcctgatcactctagccgagaactgtccaagattctggcaaagcttgaacgcttaaaacaacagaatgaagacttgaggcgaatggccgaatctctccggataccagaaggccctattgatcaggggccagctataggaagagtacgcgttttagaagagcagcttgttaaggccaaagaacagattgaaaattacaagaaacagaccagaaatggtctggggaaggatcatgaaatcctgaggaggaggattgaaaatggagctaaagagctctggtttttcctacagagtgaattgaagaaattaaagaacttagaaggaaatgaactccaaagacatgcagatgaatttcttttggatttaggacatcatgaaaggtctataatgacggatctatactacctcagtcagacagatggagcaggtgattggcgggaaaaagaggccaaagatctgacagaactggttcagcggagaataacatatcttcagaatcccaaggactgcagcaaagccaaaaagctggtgtgtaatatcaacaaaggctgtggctatggctgtcagctccatcatgtggtctactgcttcatgattgcatatggcacccagcgaacactcatcttggaatctcagaattggcgctatgctactggtggatgggagactgtatttaggcctgtaagtgagacatgcacagacagatctggcatctccactggacactggtcaggtgaagtgaaggacaaaaatgttcaagtggtcgagcttcccattgtagacagtcttcatccccgtcctccatatttacccttggctgtaccagaagacctcgcagatcgacttgtacgagtgcatggtgaccctgcagtgtggtgggtgtctcagtttgtcaaatacttgatccgcccacagccttggctagaaaaagaaatagaagaagccaccaagaagcttggcttcaaacatccagttattggagtccatgtcagacgcacagacaaagtgggaacagaagctgccttccatcccattgaagagtacatggtgcatgttgaagaacattttcagcttcttgcacgcagaatgcaagtggacaaaaaaagagtgtatttggccacagatgacccttctttattaaaggaggcaaaaacaaagtaccccaattatgaatttattagtgataactctatttcctggtcagctggactgcacaatcgatacacagaaaattcacttcgtggagtgatcctggatatacattttctctctcaggcagacttcctagtgtgtactttttcatcccaggtctgtcgagttgcttatgaaattatgcaaacactacatcctgatgcctctgcaaacttccattctttagatgacatctactattttgggggccagaatgcccacaatcaaattgccatttatgctcaccaaccccgaactgcagatgaaattcccatggaacctggagatatcattggtgtggctggaaatcattgggatggctattctaaaggtgtcaacaggaaattgggaaggacgggcctatatccctcctacaaagttcgagagaagatagaaacggtcaagtaccccacatatcctgaggctgagaaataaagctcagatggaagagataaacgaccaaactcagttcgaccaaactcagttcaaaccatttcagccaaactgtagatgaagagggctctgatctaacaaaataaggttatatgagtagatactctcagcaccaagagcagctgggaactgacataggcttcaattggtggaattcctctttaacaagggctgcaatgccctcatacccatgcacagtacaataatgtactcacatataacatgcaaacaggttgttttctactttgcccctttcagtatgtccccataagacaaacactgccatattgtgtaatttaagtgacacagacattttgtgtgagacttaaaacatggtgcctatatctgagagacctgtgtgaactattgagaagatcggaacagctccttactctgaggaagttgattcttatttgatggtggtattgtgaccactgaattcactccagtcaacagattcagaatgagaatggacgtttggtttttttttgtttttgtttttgttttttcctttataaggttgtctgtttttttttttttaaataattgcatcagttcattgacctcatcattaataagtgaagaatacatcagaaaataaaatattcactctccattagaaaattttgtaaaacaatgccatgaacaaattctttagtactcaatgtttctggacattctctttgataacaaaaaataaattttaaaaaggaattttgtaaagtttctagaattttatatcattggatgatatgttgatcagccttatgtggaagaactgtgataaaaagaggagctttttagtttttcagcttaaaaaaaaaaaaaaaaa

SEQ ID NO: 234 - DNA, 467 bp, Homo sapiens
ttttttatttgagcaatttattttttttcaaagaaatccatgcaaagagagaacgatagaaagggagggagtgagagagaaagacatggtaaccatgttctagcagccaaacataggagaataatttggcacaacttgatggttttttttctttctttgcaaaaggacaatctatatgctaccactaaaatgtatcttcctccaaaagataccatttgattttcgaaaacataacacatggttagtcctctacttcatggctggaggaggtatacaggataacaaaaaaaaaaaaatagaaaaaaataagaaagtggttccctttatcgaggaagaccacagggtgctgtagggcagcacatgtgctgggcaccaggcagtcagtgcaccaggaagaagaagcacaccaccgagatggccatgctggtgagaagcttcagcggggaatgaacgttcccgaggttgtg

SEQ ID NO: 235 - DNA, 2382 bp, Homo sapiens
ccctgccccgcgccgccaagcggttcccgccctcgcccagcgcccaggtagctgcgaggaaacttttgcagcggctgggtagcagcacgtctcttgctcctcagggccactgccaggcttgccgagtcctgggactgctctcgctccggctgccactctcccgcgctctcctagctccctgcgaagcaggatggccgggaccgtgcgcaccgcgtgcttggtggtggcgatgctgctcagcttggacttcccgggacaggcgcagcccccgccgccgccgccggacgccacctgtcaccaagtccgctccttcttccagagactgcagcccggactcaagtgggtgccagaaactcccgtgccaggatcagatttgcaagtatgtctccctaagggcccaacatgctgctcaagaaagatggaagaaaaataccaactaacagcacgattgaacatggaacagctgcttcagtctgcaagtatggagctcaagttcttaattattcagaatgctgcggttttccaagaggcctttgaaattgttgttcgccatgccaagaactacaccaatgccatgttcaagaacaactacccaagcctgactccacaagcttttgagtttgtgggtgaatttttcacagatgtgtctctctacatcttgggttctgacatcaatgtagatgacatggtcaatgaattgtttgacagcctgtttccagtcatctatacccagctaatgaacccaggcctgcctgattcagccttggacatcaatgagtgcctccgaggagcaagacgtgacctgaaagtatttgggaatttccccaagcttattatgacccaggtttccaagtcactgcaagtcactaggatcttccttcaggctctgaatcttggaattgaagtgatcaacacaactgatcacctgaagttcagtaaggactgtggccgaatgctcaccagaatgtggtactgctcttactgccagggactgatgatggttaaaccctgtggcggttactgcaatgtggtcatgcaaggctgtatggcaggtgtggtggagattgacaagtactggagagaatacattctgtcccttgaagaacttgtgaatggcatgtacagaatctatgacatggagaacgtactgcttggtctcttttcaacaatccatgattctatccagtatgtccagaagaatgcaggaaagctgaccaccactattggcaagttatgtgcccattctcaacaacgccaatatagatctgcttattatcctgaagatctctttattgacaagaaagtattaaaagttgctcatgtagaacatgaagaaaccttatccagccgaagaagggaactaattcagaagttgaagtctttcatcagcttctatagtgctttgcctggctacatctgcagccatagccctgtggcggaaaacgacaccctttgctggaatggacaagaactcgtggagagatacagccaaaaggcagcaaggaatggaatgaaaaaccagttcaatctccatgagctgaaaatgaagggccctgagccagtggtcagtcaaattattgacaaactgaagcacattaaccagctcctgagaaccatgtctatgcccaaaggtagagttctggataaaaacctggatgaggaagggtttgaaagtggagactgcggtgatgatgaagatgagtgcattggaggctctggtgatggaatgataaaagtgaagaatcagctccgcttccttgcagaactggcctatgatctggatgtggatgatgcgcctggaaacagtcagcaggcaactccgaaggacaacgagataagcacctttcacaacctcgggaacgttcattccccgctgaagcttctcaccagcatggccatctcggtggtgtgcttcttcttcctggtgcactgactgcctggtgcccagcacatgtgctgccctacagcaccctgtggtcttcctcgataaagggaaccactttcttatttttttctatttttttttttttgttatcctgtatacctcctccagccatgaagtagaggactaaccatgtgttatgttttcgaaaatcaaatggtatcttttggaggaagatacattttagtggtagcatatagattgtccttttgcaaagaaagaaaaaaaaccatcaagttgtgccaaattattctcctatgtttggctgctagaacatggttaccatgtctttctctctcactccctccctttctatcgttctctctttgcatggatttctttgaaaaaaaataaattgctcaaataaaaaaaaaaaaaaaaaaaaaaaaaaaaaaaaaaaaaaaaaaaaaaaaaaaaaaaaaaaaaaaaaaaaaaaaaaa

SEQ ID NO: 236 - DNA, 398 bp, Homo sapiens
  modified_base (39)..(39): a, c, t or g
  modified_base (86)..(86): a, c, t or g
  modified_base (113)..(113): a, c, t or g
  modified_base (119)..(119): a, c, t or g
  modified_base (281)..(281): a, c, t or g
  modified_base (291)..(291): a, c, t or g
  modified_base (294)..(294): a, c, t or g
  modified_base (346)..(346): a, c, t or g
  modified_base (384)..(384): a, c, t or g
ggtggcaatcacagtctttaatcattaattgtcatattnctgatttgttagcaagtcccagcttgtaggctggttgaagtacaganctcagaggaaaaaagaaattaaatttnagcttnctggagagcagcccctctctggcaccatcaaacacttctttgtttcccttcaacttggaactcttcaaacatcaggggttgtgagggtttggccattcttttatcttgggtccatgtgagtgacagaaatggtgcggcctgggaaagatctccctcctttanatttcctctnctncctccttcctccttattctaaaactgtgcctccaacagaggggcaggggctnttgtagagagatccctgggcccagggacaggaagaatngccaaatctaattt

SEQ ID NO: 237 - DNA, 4266 bp, Homo sapiens
agagtttcagttttggcagcagcgtccagtgccctgccagtagctcctagagaggcaggggttaccaactggccagcaggctgtgtccctgaagtcagatcaacgggagagaaggaagtggctaaaacattgcacaggagaagtcggcctgagtggtgcggcgctcgggacccaccagcaatgctgctcttcgtgctcacctgcctgctggcggtcttcccagccatctccacgaagagtcccatatttggtcccgaggaggtgaatagtgtggaaggtaactcagtgtccatcacgtgctactacccacccacctctgtcaaccggcacacccggaagtactggtgccggcagggagctagaggtggctgcataaccctcatctcctcggagggctacgtctccagcaaatatgcaggcagggctaacctcaccaacttcccggagaacggcacatttgtggtgaacattgcccagctgagccaggatgactccgggcgctacaagtgtggcctgggcatcaatagccgaggcctgtcctttgatgtcagcctggaggtcagccagggtcctgggctcctaaatgacactaaagtctacacagtggacctgggcagaacggtgaccatcaactgccctttcaagactgagaatgctcaaaagaggaagtccttgtacaagcagataggcctgtaccctgtgctggtcatcgactccagtggttatgtaaatcccaactatacaggaagaatacgccttgatattcagggtactggccagttactgttcagcgttgtcatcaaccaactcaggctcagcgatgctgggcagtatctctgccaggctggggatgattccaatagtaataagaagaatgctgacctccaagtgctaaagcccgagcccgagctggtttatgaagacctgaggggctcagtgaccttccactgtgccctgggccctgaggtggcaaacgtggccaaatttctgtgccgacagagcagtggggaaaactgtgacgtggtcgtcaacaccctggggaagagggccccagcctttgagggcaggatcctgctcaacccccaggacaaggatggctcattcagtgtggtgatcacaggcctgaggaaggaggatgcagggcgctacctgtgtggagcccattcggatggtcagctgcaggaaggctcgcctatccaggcctggcaactcttcgtcaatgaggagtccacgattccccgcagccccactgtggtgaagggggtggcaggaggctctgtggccgtgctctgcccctacaaccgtaaggaaagcaaaagcatcaagtactggtgtctctgggaaggggcccagaatggccgctgccccctgctggtggacagcgaggggtgggttaaggcccagtacgagggccgcctctccctgctggaggagccaggcaacggcaccttcactgtcatcctcaaccagctcaccagccgggacgccggcttctactggtgtctgaccaacggcgatactctctggaggaccaccgtggagatcaagattatcgaaggagaaccaaacctcaaggtaccagggaatgtcacggctgtgctgggagagactctcaaggtcccctgtcactttccatgcaaattctcctcgtacgagaaatactggtgcaagtggaataacacgggctgccaggccctgcccagccaagacgaaggccccagcaaggccttcgtgaactgtgacgagaacagccggcttgtctccctgaccctgaacctggtgaccagggctgatgagggctggtactggtgtggagtgaagcagggccacttctatggagagactgcagccgtctatgtggcagttgaagagaggaaggcagcggggtcccgcgatgtcagcctagcgaaggcagacgctgctcctgatgagaaggtgctagactctggttttcgggagattgagaacaaagccattcaggatcccaggctttttgcagaggaaaaggcggtggcagatacaagagatcaagccgatgggagcagagcatctgtggattccggcagctctgaggaacaaggtggaagctccagagcgctggtctccaccctggtgcccctgggcctggtgctggcagtgggagccgtggctgtgggggtggccagagcccggcacaggaagaacgtcgaccgagtttcaatcagaagctacaggacagacattagcatgtcagacttcgagaactccagggaatttggagccaatgacaacatgggagcctcttcgatcactcaggagacatccctcggaggaaaagaagagtttgttgccaccactgagagcaccacagagaccaaagaacccaagaaggcaaaaaggtcatccaaggaggaagccgagatggcctacaaagacttcctgctccagtccagcaccgtggccgccgaggcccaggacggcccccaggaagcctagacggtgtcgccgcctgctccctgcacccatgacaatcaccttcagaatcatgtcgatcctggggccctcagctcctggggaccccactccctgctctaacacctgcctaggtttttcctactgtcctcagaggcgtgctggtcccctcctcagtgacatcaaagcctggcctaattgttcctattggggatgagggtggcatgaggaggtcccacttgcaacttctttctgttgagagaacctcaggtacggagaagaatagaggtcctcatgggtcccttgaaggaagagggaccagggtgggagagctgattgcagaaaggagagacgtgcagcgcccctctgcacccttatcatgggatgtcaacagaatttttccctccactccatccctccctcccgtccttcccctcttcttctttccttccatcaaaagatgtatttgaattcatactagaattcaggtgctttgctagatgctgtgacaggtatgccaccaacactgctcacagcctttctgaggacaccagtgaaagaagccacagctcttcttggcgtatttatactcactgagtcttaacttttcaccaggggtgctcacctctgcccctattgggagaggtcataaaatgtctcgagtcctaaggccttaggggtcatgtatgatgagcatacacacaggtaattataaacccacattcttaccatttcacacataagaaaattgaggtttggaagagtgaagcgtttttctttttcttttttttttttgagacggagtctctcactgtcgcccaggctggagtgcagtggcgcaatctcggctcactgcaacctccgcctcccaggttgacaccattctcctgcctcaccctcccaagtagctgggactacaggcgcctgccagcacgcctggctaattttttgtatttttagtagagacagggtttcaccgtgttagccaggatggtctcgatctcctgacctcgtgatccgcctgcctctgcctcccaaagtgctgggattacaggcgtgagccaccgcgtccggcctctttttttcttttcttttttttgagacaaagtctcactgtgtcacccagactggaatgcagtgacacaatctcggctcactgaaacctctgccttccaggttcaagctattctcatgcctcagcctctcaagtagctgggactacagatgtgggccaccatgtctggctaattttttttttttttttttttttttgtagagacagggtttcgccatgttgacgagactggtctcgaactcctggcctcaagtgatctgccgcctcagcttctcaaagtactgggattatataggcatgagccactgagcctggccctgaagcgtttttctcaaaggccctcagtgagataaattagatttggcatctcctgtcctgggccagggatctctctacaagagcccctgcccctctgttggaggcacagttttagaataaggaggaggagggagaagagaaaatgtaaaggagggagatctttcccaggccgcaccatttctgtcactcacatggacccaagataaaagaatggccaaaccctcacaacccctgatgtttgaagagttccaagttgaagggaaacaaagaagtgtttgatggtgccagagaggggctgctctccagaaagctaaaatttaatttcttttttcctctgagttctgtacttcaaccagcctacaagctggcacttgctaacaaatcagaaatatgacaattaatgattaaagactgtgattgcc

SEQ ID NO: 238 - DNA, 418 bp, Homo sapiens
  modified_base (9)..(9): a, c, t or g
  modified_base (13)..(13): a, c, t or g
  modified_base (172)..(172): a, c, t or g
  modified_base (247)..(247): a, c, t or g
  modified_base (249)..(249): a, c, t or g
  modified_base (268)..(268): a, c, t or g
  modified_base (386)..(386): a, c, t or g
  modified_base (417)..(417): a, c, t or g
gggacccanaaanaaccttttaattccaagcagagtccccctcccccagcatggtcacacacacagtggaaagggatgtcagggtctgggcaggagcaatacccagacctgggcaaaaatatagatatcattatatacacacgtggactggaaagaagtcaagctgggggtntaaggtagggcaggggcaggtgaggaaagcagctgggggggccccaataaattacattcttgagagagcatagtntntgggcggggtgcgtgggtntagggtgagagctggtagccagggacacttccaaaatttgccagggcctgggcttctttgaccccattccaagggaggcggaaggcccagctttcttgcccggtgcctgggcttagtncttggaatttcccttttcgttggccttgggna

SEQ ID NO: 239 - DNA, 465 bp, Homo sapiens
  modified_base (246)..(246): a, c, t or g
  modified_base (370)..(370): a, c, t or g
  modified_base (405)..(405): a, c, t or g
  modified_base (413)..(413): a, c, t or g
  modified_base (423)..(423): a, c, t or g
  modified_base (439)..(439): a, c, t or g
atactcttttacccatataggaaaacttcaaaaaagacaatatgattttctgggctacaaaatagcatttactgaataccatttgtgaaaatattgatatgcctacaacagaaaacatctttggaaggacataccagacatttgctgtgaggagaacagtatggatagtgagtgaccagtaaggagagatttctactttaaaaaatatatttgtgtatattttcagtttcaaattaaatacacaantaaggtataaaatatctactttctggaacagtgaggcagggttctctggcaggtattttccatcctttggactttatctctggcttttggggtctccatggtggtatggttccccggacttttnccaacttccaccaggacgggggggtggaataaggnggggaggnccggggggtnttgaaggggtttaggnccctgggttccctcaggaggtcgggg

SEQ ID NO: 240 - DNA, 1395 bp, Homo sapiens
  modified_base (37)..(37): a, c, t or g
  modified_base (896)..(896): a, c, t or g
  modified_base (926)..(926): a, c, t or g
  modified_base (951)..(951): a, c, t or g
  modified_base (953)..(953): a, c, t or g
  modified_base (964)..(964): a, c, t or g
  modified_base (970)..(972): a, c, t or g
  modified_base (980)..(980): a, c, t or g
  modified_base (1030)..(1030): a, c, t or g
  modified_base (1035)..(1035): a, c, t or g
  modified_base (1037)..(1037): a, c, t or g
  modified_base (1051)..(1051): a, c, t or g
  modified_base (1062)..(1062): a, c, t or g
  modified_base (1064)..(1064): a, c, t or g
  modified_base (1066)..(1066): a, c, t or g
  modified_base (1079)..(1081): a, c, t or g
  modified_base (1088)..(1089): a, c, t or g
  modified_base (1095)..(1095): a, c, t or g
  modified_base (1099)..(1099): a, c, t or g
  modified_base (1106)..(1106): a, c, t or g
  modified_base (1112)..(1112): a, c, t or g
  modified_base (1116)..(1116): a, c, t or g
  modified_base (1120)..(1120): a, c, t or g
  modified_base (1125)..(1125): a, c, t or g
  modified_base (1129)..(1129): a, c, t or g
  modified_base (1134)..(1140): a, c, t or g
  modified_base (1142)..(1142): a, c, t or g
  modified_base (1145)..(1146): a, c, t or g
  modified_base (1152)..(1152): a, c, t or g
  modified_base (1155)..(1155): a, c, t or g
  modified_base (1160)..(1160): a, c, t or g
  modified_base (1169)..(1170): a, c, t or g
  modified_base (1172)..(1173): a, c, t or g
  modified_base (1180)..(1180): a, c, t or g
  modified_base (1185)..(1186): a, c, t or g
  modified_base (1207)..(1207): a, c, t or g
  modified_base (1209)..(1219): a, c, t or g
  modified_base (1222)..(1222): a, c, t or g
  modified_base (1224)..(1224): a, c, t or g
  modified_base (1226)..(1238): a, c, t or g
  modified_base (1240)..(1242): a, c, t or g
  modified_base (1246)..(1248): a, c, t or g
  modified_base (1254)..(1255): a, c, t or g
  modified_base (1260)..(1283): a, c, t or g
  modified_base (1286)..(1293): a, c, t or g
  modified_base (1305)..(1305): a, c, t or g
  modified_base (1311)..(1389): a, c, t or g
  modified_base (1391)..(1395): a, c, t or g
cagatcgaattaatacgactcacttatagggaatttnggccctcgcaggccaagaattcggcatgaggtggacagatgcctgactccccctttaactggtattttggggtcagtcacagccctgtcatttgtgagaagtctgggtagtttgagatctacataaaatatcttttaaattcttcatagcatattttttcaccaagtgagttaaaaacacaggaagaaggggagattgacttgtgacccttttcctttccttttgatattgttttggttttacatgtttgcaggcgtggagtcctgcctgccacaaggaccattttggcagctttctttcatccatcttggacatcttttcatgttaatacatttaaagccaccactatatgatttctcatgactaatccctggtgtggatatgcctatgaaaccactccttctgtgatggacttttgagttgttagcagaatattctggaaatagaattgctgagtcaaggaatatgattgttttgaattgtacaaggtaaagccatacctcactatccttaccaccttggtccaacatgtcccagcttctgaggggagcaaggactagacgcttcacagcctggagcttcctctttattcatcctctgtctggtggagttggaaagtcgggaacatacacatggagaccaaaagcagagataagtcaaaggatggaaatactgcagagaacctgctcactgttcagaaagtagatattttatacttatttgtgtatttaatttgaaactgaaaatatacacaaatatattttttaaagtagaaatctctccttactggtcactcactatccatactgttctcctcacagcaaatgtctggtatgtccttccaaagatgttttctgtngtaggcatatcaatatttccacaaatggtntccagtaaatgctattttgtagccnanaaatcatatgntctttnnngaagtttncctatatgggtaaagagttttaatcgaaaaaaaaaaaaaaaagggggggnccggnancctttccccttagnggggttatttnangnggccccgggccgnnntttaaannttgggngggnaaaaccngggttnccanttanccccngganggggnnnnnnnanaannccccanaancccgngaatggggnngnnaaccaanccccnnggggggggggggggggggaancnnnnnnnnnnnccngncnnnnnnnnnnnnncnnncccnnngggggnnggggnnnnnnnnnnnnnnnnnnnnnnnnccnnnnnnnnggggggggggcncccccnnnnnnnnnnnnnnnnnnnnnnnnnnnnnnnnnnnnnnnnnnnnnnnnnnnnnnnnnnnnnnnnnnnnnnnnnnnnnnnannnnn

SEQ ID NO: 241 - DNA, 1578 bp, Homo sapiens
gcgacgcgccgaggtactaggcagagccgtggaaccgccgccaggtcgctgttggtccacgccgcccgtcgcgccgcccgcccgctcagcgtccgccgccgccatgggagtgcaggtggaaaccatctccccaggagacgggcgcaccttccccaagcgcggccagacctgcgtggtgcactacaccgggatgcttgaagatggaaagaaatttgattcctcccgggacagaaacaagccctttaagtttatgctaggcaagcaggaggtgatccgaggctgggaagaaggggttgcccagatgagtgtgggtcagagagccaaactgactatatctccagattatgcctatggtgccactgggcacccaggcatcatcccaccacatgccactctcgtcttcgatgtggagcttctaaaactggaatgacaggaatggcctcctcccttagctccctgttcttggatctgccatggagggatctggtgcctccagacatgtgcacatgagtccatatggagcttttcctgatgttccactccactttgtatagacatctgccctgactgaatgtgttctgtcactcagctttgcttccgacacctctgtttcctcttcccctttctcctcgtatgtgtgtttacctaaactatatgccataaacctcaagttattcattttattttgttttcattttggggtgaagattcagtttcagtcttttggatataggtttccaattaagtacatggtcaagtattaacagcacaagtggtaggttaacattagaataggaattggtgttggggggggggtttgcaagaatattttattttaattttttggatgaaatttttatctattatatattaaacattcttgctgctgcgctgcaaagccatagcagatttgaggcgctgttgaggactgaattactctccaagttgagagatgtctttgggttaaattaaaagccctacctaaaactgaggtggggatggggagagcctttgcctccaccattcccacccaccctccccttaaaccctctgcctttgaaagtagatcatgttcactgcaatgctggacactacaggtatctgtccctgggccagcagggacctctgaagccttctttgtggccttttttttttttcatcctgtggtttttctaatggactttcaggaattttgtaatctcataactttccaagctccaccacttcctaaatcttaagaactttaattgacagtttcaattgaaggtgctgtttgtagacttaacacccagtgaaagcccagccatcatgacaaatccttgaatgttctcttaagaaaatgatgctggtcatcgcagcttcagcatctcctgttttttgatgcttggctccctctgctgatctcagtttcctggcttttcctccctcagccccttctcacccctttgctgtcctgtgtagtgatttggtgagaaatcgttgctgcacccttcccccagcaccatttatgagtctcaagttttattattgcaataaaagtgctttatgccggcttttctcaaaaaaaaaaaaaaaaaa

SEQ ID NO: 242 - DNA, 271 bp, Homo sapiens
  modified_base (3)..(3): a, c, t or g
  modified_base (15)..(15): a, c, t or g
  modified_base (76)..(76): a, c, t or g
  modified_base (123)..(123): a, c, t or g
  modified_base (128)..(128): a, c, t or g
  modified_base (136)..(137): a, c, t or g
  modified_base (180)..(181): a, c, t or g
  modified_base (189)..(189): a, c, t or g
  modified_base (203)..(203): a, c, t or g
  modified_base (213)..(213): a, c, t or g
  modified_base (239)..(239): a, c, t or g
ctnagataatatagnggaaaaaataaacctccaattcagggtataaaaacagagcgaaggcacttggggctggggntggaggggtggcccccacaggcaatactgagatggcccgggtcaccntggtnccctccannttggagccctgagtcccccaagcagagggcaggagggagaganngccgaggntcatgcggggccantaaccccagntgggcccctcccagggcttggcccanagttccctttcctaaggccctcggggttttaa

SEQ ID NO: 243 - DNA, 308 bp, Homo sapiens
  modified_base (40)..(40): a, c, t or g
  modified_base (42)..(42): a, c, t or g
  modified_base (44)..(44): a, c, t or g
  modified_base (246)..(246): a, c, t or g
  modified_base (296)..(296): a, c, t or g
ctcagtgacctcctgcccttctgcagaccaggccccgagnangncttcgctgccacggcccttcggaaagtgctgtccctgaagcagcttctgtttccggcggaggaagacaatggggcggggctcctcgagatggggatggggtcccagggggcggccccctgagcccagcacggacccaggaaatccaggagaacctgctcagcttggaggagaccatgaagcagctggaggagtttggaggangaatttttgccgcctgagacccctcctgttctcagtttgggggaactctnttccccagcctt

SEQ ID NO: 244 - DNA, 3261 bp, Homo sapiens
ggtggactcagggcggctagagcgacgcggcggcaggggtggggagagtgcggagcccgagcgcggaggcttcggttccggtggcggcgatggcttctctttccacctggagcagccctgcagagcccagggagatggaagacttcgcccgaggggcggcctccccaggcccctcccggcctggcctggttcccgtcagcatcatcggggctgaggatgaggattttgagaacgagctggagacaaactcagaagagcaaaacagccagttccagagcctggagcaggtgaagcggcgcccagcccacctcatggccctcctgcagcacgtggccctgcagtttgagccaggacccctgctttgctgtctgcatgccgacatgctgggctcactgggccccaaggaggccaagaaggccttcctggacttctaccacagcttcctggagaagacagcggttctccgggtgccggtccctcccaacgtcgcctttgaacttgaccgcactagggctgacctcatctccgaggatgtccagcggcggttcgtgcaggaggtggtgcaaagccagcaggtagccgtgggccggcagctggaggacttccgttccaagcggctcatgggcatgacgccctgggagcaggagctggcccagctggaggcttgggttgggcgggaccgagccagctacgaggcccgggagcggcacgtggcggagcggctgctcatgcacctggaggagatgcaacataccatctctaccgacgaagaaaagagtgctgccgtggtcaacgccattggcctgtacatgcgccaccttggggtgcggaccaagagtggagacaagaagtcggggaggaacttcttccggaaaaaggtgatggggaaccggcggtcggacgagcctgccaagaccaagaaggggctgagcagcatcctggatgccgcccgctggaaccggggagagccccaggttccagattttcgacacctcaaagcagaggttgatgccgagaagccaggtgctacagaccggaagggaggcgtggggatgccctctcgggaccggaatatcggggctcctgggcaggacacccctggagtctctctgcaccctctgtccctggacagcccagaccgggaaccaggtgctgacgcccccctggagctgggggactcatccccgcagggcccaatgagcctggagtccttggcgcccccagagagtaccgacgagggggccgaaaccgagagccccgagcctggagatgagggggagccggggcggtcgggactggagcttgaaccagaagagcctcccggctggcgggaactcgtccccccagacaccctgcacagcctgcccaagagccaggtgaagcggcaggaggtcatcagcgagctgctggtgacagaggcggcccacgtgcgcatgctgcgggtgctgcacgacctcttcttccagcccatggcagaatgcctgttcttccccttggaggagctgcagaacatcttccccagcctggacgagctcatcgaggtgcattccctgttcctcgatcgcctgatgaagcggaggcaggagagtggctacctcatcgaggagatcggagacgtgctgctggcccggtttgatggtgctgagggctcctggttccagaaaatctcctcccgcttctgcagccgccagtcatttgccttagagcagctcaaagccaagcaacgcaaggaccctcggttctgtgccttcgtgcaggaagctgagagccgcccgcggtgccgccgcctgcagctgaaggacatgatccccacggagatgcagcggctgaccaagtaccccctgctcctgcagagcatcgggcagaacacagaagagcccacagaacgggagaaagtggagctggcagccgagtgctgccgggaaattctacaccacgtcaaccaagccgtgcgtgacatggaggacctgctgaggctcaaggactatcagcggcgcctggacttgtcccaccttcggcagagcagcgaccctatgctgagcgagttcaagaacctggacatcaccaagaagaaattggtccacgagggcccactgacgtggcgggtgactaaggacaaggcagtggaggtgcatgtgctgctgctggacgacctgctgctgctgctccagcgccaggacgagcggctgctgctcaagtcccatagccggacactgacgcccacgcccgatggcaagaccatgctgcggcccgtgctgcggctcacctccgccatgacccgcgaggtggccaccgatcacaaagccttctacgtcctttttacctgggaccaggaggcccagatatacgagctggtggcacagactgtgtcggagcggaaaaactggtgtgctctcatcactgagactgccggatccctgaaagtccctgcccctgcctctcgccctaagccccggcccagcccgagcagcacccgagaacccctcctcagcagctctgagaacggcaatggtggccgagagacgtctccagctgatgcccggaccgagagaatcctcagtgacctcctgcccttctgcagaccaggccccgagggccagctcgctgccacggcccttcggaaagtgctgtccctgaagcagcttctgtttccggcggaggaagacaatggggcggggcctcctcgagatggggatggggtcccagggggcggccccctgagcccagcacggacccaggaaatccaggagaacctgctcagcttggaggagaccatgaagcagctggaggagttggaggaggaattttgccgcctgagacccctcctgtctcagcttggggggaactctgtcccccagcctggctgcacttgaggttcccgcccaggaaggccttttgcaagaaggagaggaatgggggagaggacgtgagggaccacccccacccacacagctgccgcagcatctcacaccccgagggcctgaggagagggagctgtgggccacgcctgggaggggcccagctggggttactggccccgcatgagcctcggccatctctccctcctgccctctgcttgggggactcagggctccattctggagggcaccacggtgacccgggccatctcagtattgcctgtgggggccacccctccacccccacccccaagtgccttcgctctgtttttataccctgaattggaggtttattttttaatatatattatctaagaagaaaaaaaaaaaaaaaaaaaaaaaa

SEQ ID NO: 245 - DNA, 424 bp, Homo sapiens
  modified_base (8)..(10): a, c, t or g
  modified_base (378)..(378): a, c, t or g
aagaatannnacttctgttttaattggccagtaaaatacattgcaaatcattagtattttataaacagaaacattaagttataaatccatgttaaaaattgcagctcagtgcagccccaacagctgtgtgtccaaaagtctatttttacaacattttcctccagtatttttgtgacaagaaagttcctatctgtcatctagatcaagagcctgaactacagtattttcaaacaagaaccgggagaagtcggtacaaggatacgtcgtgctgtgtatttaaacggcgcttcccacacacctgccgtctgcatcccgggaggacgccctttgggaaaggcctcctcggcagtgtgaggtctgggaggggtctgcctgggnccccatttttagggtgctcccctccccaattaaaacagcagccccc

SEQ ID NO: 246 - DNA, 331 bp, Homo sapiens
  modified_base (81)..(81): a, c, t or g
  modified_base (103)..(103): a, c, t or g
  modified_base (210)..(210): a, c, t or g
  modified_base (271)..(271): a, c, t or g
  modified_base (293)..(293): a, c, t or g
  modified_base (312)..(312): a, c, t or g
  modified_base (327)..(327): a, c, t or g
gaaggaccatttttaattagctctttgatacaaagtaactcagaacgtcaaaacctatacccactaaagggaaggctgccnggaagcaaatggaacaggaatngagcctgtctcaggaaggccagctgcaggtcctccagaaaatcaaagaagggaagaaactctgagtttgaggtacaggggcttcggggtgcagacgtccctccaggncccatggtcagtattgcacctgtgttatgaacccccagatgctgtgcagggcatggtcggnggctggctgttttattggggangggtagcatcctaaaaatngggtccagggcagancttg

SEQ ID NO: 247 - DNA, 4220 bp, Homo sapiens
tggcggtcttgcaggcgggcggaccctcggccgcgctcggggctccggcgccgccgctcctcctgctcggcctgagctgcccgggctcggcgcgcgcttggggcgaggctcggcgggcgcggacgcgcagcatggcggtggaggacgaggggctccgggtcttccagagcgtgaagatcaagatcggtgaagccaaaaaccttccctcttacccggggccgagcaagatgagggattgctactgcacggtgaacctggaccaggaggaggttttcaggaccaaaattgtggaaaagtcactctgcccgttttacggagaagacttttactgtgaaattcctcggagctttcgtcacctgtccttctacattttcgatagagacgttttccggagggattccatcatagggaaggtggccatccagaaggaggacttgcagaagtaccacaacagggacacctggttccagctgcagcacgtggacgctgactcggaagtgcagggcaaagtgcacctggagctgcggctgagcgaggtcatcacagacactggggtcgtctgccacaagctcgccacacgcatcgtcgagtgccagggcctccccatcgtgaatgggcaatgtgacccctacgccaccgtgacgctggcaggacccttcagatcagaagcaaagaagacgaaagtgaagaggaagaccaacaatccccagttcgatgaagtgttttattttgaggtgacccggccctgtagctacagcaagaagtcccactttgactttgaggaggaagacgtggacaagctcgaaatcagagttgacctctggaatgccagtaacctgaagtttggagatgaattcctgggagaactaaggatcccgttgaaagtcctgcggcagtccagctcctacgaggcgtggtacttcctccagccccgggacaatggtagcaagagcctaaagccagacgacctgggctccctgcggctgaacgtggtatacacggaagaccacgtgttttcttctgactattacagccctctgcgggacctgctgttgaagtctgcggatgtggagcccgtgtcagcgtctgcggcccacatcctgggcgaggtttgccgggagaagcaggaggcggccgtcccgctggtgcggctcttcctacactatggcagggtggtgccattcatcagtgccatcgccagcgcggaggtgaagcggacccaggaccccaacaccatcttccgaggaaactcactggcgtccaagtgcatcgacgagaccatgaagctggcggggatgcattacctgcatgtcaccctgaagcccgccatcgaggagatatgccagagccacaaaccctgtgaaatcgaccctgtgaagttgaaagacggagaaaaccttgaaaacaacatggagaacctacggcagtatgtggaccgcgtcttccacgccatcactgagtctggggtgagctgcccgaccgtcatgtgtgacatcttcttctccctccgggaggcggcggccaagcgcttccaggatgacccggacgtcaggtacactgcagtgagcagcttcatcttcctgaggttctttgcgcccgccattctctcccccaacctcttccagctcacgccgcaccacacggacccccagacgtccaggacgctgacattgatctccaagaccgttcagaccctcggcagcctgtccaagtccaaatctgcgagttttaaggagtcctacatggctacattttatgaattcttcaatgagcagaaatatgctgatgcggtgaagaacttcttggatctgatttcgtcctcggggagaagagaccccaagagtgttgagcagcccatcgtgcttaaagaagggttcatgatcaagagggcccaaggacggaagcgctttgggatgaagaattttaagaagagatggtttcgcttgaccaaccatgaatttacctaccacaaaagcaaaggggaccagcctctctacagcattcccatcgagaacatcctggcagtggagaagctggaggaggagtctttcaaaatgaaaaacatgttccaggtcatccagccagagcgtgcgctgtacatccaggccaacaactgcgtggaggccaaggactggatcgacattctcaccaaagtgagccagtgcaaccagaagcgcctcaccgtctaccacccgtccgcctacctgagcggccactggctgtgctgtagggcgccatccgactcggctccgggctgctcgccctgcactggcggcctcccagccaacatccagctggacattgatggggaccgtgagacggagcgtatctactccctcttcaacttgtacatgagcaagctggagaagatgcaggaggcctgtgggagcaaatctgtgtatgacggcccggagcaggaggagtattcgacgttcgtcattgacgacccccaggagacctacaagacgctaaagcaagtcatcgctggggttggggctttggagcaggagcacgcccagtataagagggacaagttcaagaagacgaaatatggaagccaggagcaccccatcggagacaagagcttccagaactacatccggcagcagtccgagacctccactcattccatttaaagtctgcgggacgcgcccagtggcgccagcaagctgcccatgcaaagccgcagcctttgggagggagaagagaaggaagagcgcagagccggcaaagtgagatgcacgccgtcccggcccatagacaagtggcgctggggtttccctctcccagaaccgctgccaccaccgccacgccctccgcagaaagcccacctggccctgtggaacgtgtcgtcatttgattctgtgctttttgctccttgtttgtggggatctggggatcagctgaaggatcaggaagtgtgggctgtgccctagccacaccacagccagcctcagggagccacggcccgtctagtcgactgtgacatgcacctccggccgtgtgtgcgtcagtctcgtgcacgtctgtcttgcgtgcacggtgcgtgtgacgctgggctctgtggctctgtgcccgggaggcctgctggccccgcctcggctttcggcttcatcacattgggaggttcagagcattactctcccactgtgcctgccatccaggcagccatgggaggcggcctccctgttccactttcgaggttcgtttgattcctggctgaggggtcagttttatggctgggaggtgcagaattacacagaagtcccagtctgaggatgtccttggtgcttgggggatacgggttctgtccacagagtcccttggagggaaaggtgtgggctccagcttctccaggcgtctgcggagcccacagttgaagcccacatcgttttgctgttgaatggggtttaaaatcagaattaacatttgccaccccccgtggaagtttgaagattttaaaaatagaaatgtacatttttcaagctgtttttctttatgtttttgaaggaccatttttaattagctctttgatacaaagtaactcagaacgtcaaaacctatacccactaaagggaaggctgccgggaaggcaaatggaacaggaatggagcctgtctcaggaaggccagctgcaggtcctccagaaaatcaaagaagggaagaaactctgagtttgaggtacaggggcttcggggtgcagacgtccctccagggcccatggtcagtattgcacctgtgttatgaacccccagatgctgtgcagggcaggggcgggggctgctgttttattggggaggggagcatcctaaaaatggggtccaggcagacccctccagacctcacactgccgaggaggcctttcccaaagggcgtcctcccgggatgcagacggcaggtgtgtgggaagcgccgtttaaatacacagcacgacgtatccttgtaccgacttctcccggttcttgtttgaaaatactgtagttcaggctcttgatctagatggcagataggaactttcttgtcacaaaaatactggaggaaaatgttgtaaaaatagacttttggacacacagctgttggggctgcactgagctgcaatttttaacatggatttataacttaatgtttctgtttataaaatactaatgatttgcaatgtattttactggccaattaaaacagatgttttattctttctgaaaaaaaaaaaaaaaaaaaaa

SEQ ID NO: 248 - DNA, 247 bp, Homo sapiens
  modified_base (14)..(17): a, c, t or g
  modified_base (29)..(29): a, c, t or g
  modified_base (42)..(42): a, c, t or g
  modified_base (71)..(71): a, c, t or g
  modified_base (138)..(138): a, c, t or g
  modified_base (144)..(144): a, c, t or g
  modified_base (182)..(182): a, c, t or g
  modified_base (192)..(192): a, c, t or g
  modified_base (194)..(194): a, c, t or g
  modified_base (198)..(198): a, c, t or g
  modified_base (217)..(217): a, c, t or g
  modified_base (220)..(220): a, c, t or g
aaatatatctgaannnnttaagtacagtntaaaacagggttntggcaacagaaagtaaaaactaacatggnttgctataaatatgctgaagcctagttgttcaaatgatacaattctctcatgctactctaaagtttntaaagnaaaagggtttacactttacacactgtacacaaaggggntaccttctgngngccngggagtggggaaagggganggngacttgacgtcaagggtgcttttgagg

SEQ ID NO: 249 - DNA, 329 bp, Homo sapiens
  modified_base (57)..(57): a, c, t or g
  modified_base (82)..(82): a, c, t or g
  modified_base (159)..(159): a, c, t or g
  modified_base (264)..(264): a, c, t or g
  modified_base (278)..(278): a, c, t or g
aacagtcaccgacaacatgctgtgtgctggagacactcggagcggcgggccccaggnaaacttgcacgacgcctgccagggnatttcgggaggccccctggtgtgtctgaacgatggccgcatgactttggtgggcatcatcagctggggcctgggctntggacagaaggatgtcccgggtgtgtacaccaaggttaccaactacctagactggattcgtgacaacatgcgaccgtgaccaggaacacccgactcctcaaaagnaaatgagatcccgnctcttcttcttcagaagacactgcaaaggcgcagtgcttctctacagactt

SEQ ID NO: 250 - DNA, 2653 bp, Homo sapiens
atggccctgtccactgagcatcctcccgccacacagaaacccgcccagccggggccaccgaccccaccccctgcctggaaacttaaggaggccggagctgtggggagctcagagctgagatcctacaggagtccagggctggagagaaaacctctgcgaggaaagggaaggagcaagccgtgaatttaagggacgctgtgaagcaatcatggatgcaatgaagagagggctctgctgtgtgctgctgctgtgtggagcagtcttcgtttcgcccagccaggaaatccatgcccgattcagaagaggagccagatcttaccaagtgatctgcagagatgaaaaaacgcagatgatataccagcaacatcagtcatggctgcgccctgtgctcagaagcaaccgggtggaatattgctggtgcaacagtggcagggcacagtgccactcagtgcctgtcaaaagttgcagcgagccaaggtgtttcaacgggggcacctgccagcaggccctgtacttctcagatttcgtgtgccagtgccccgaaggatttgctgggaagtgctgtgaaatagataccagggccacgtgctacgaggaccagggcatcagctacaggggcacgtggagcacagcggagagtggcgccgagtgcaccaactggaacagcagcgcgttggcccagaagccctacagcgggcggaggccagacgccatcaggctgggcctggggaaccacaactactgcagaaacccagatcgagactcaaagccctggtgctacgtctttaaggcggggaagtacagctcagagttctgcagcacccctgcctgctctgagggaaacagtgactgctactttgggaatgggtcagcctaccgtggcacgcacagcctcaccgagtcgggtgcctcctgcctcccgtggaattccatgatcctgataggcaaggtttacacagcacagaaccccagtgcccaggcactgggcctgggcaaacataattactgccggaatcctgatggggatgccaagccctggtgccacgtgctgaagaaccgcaggctgacgtgggagtactgtgatgtgccctcctgctccacctgcggcctgagacagtacagccagcctcagtttcgcatcaaaggagggctcttcgccgacatcgcctcccacccctggcaggctgccatctttgccaagcacaggaggtcgcccggagagcggttcctgtgcgggggcatactcatcagctcctgctggattctctctgccgcccactgcttccaggagaggtttccgccccaccacctgacggtgatcttgggcagaacataccgggtggtccctggcgaggaggagcagaaatttgaagtcgaaaaatacattgtccataaggaattcgatgatgacacttacgacaatgacattgcgctgctgcagctgaaatcggattcgtcccgctgtgcccaggagagcagcgtggtccgcactgtgtgccttcccccggcggacctgcagctgccggactggacggagtgtgagctctccggctacggcaagcatgaggccttgtctcctttctattcggagcggctgaaggaggctcatgtcagactgtacccatccagccgctgcacatcacaacatttacttaacagaacagtcaccgacaacatgctgtgtgctggagacactcggagcggcgggccccaggcaaacttgcacgacgcctgccagggcgattcgggaggccccctggtgtgtctgaacgatggccgcatgactttggtgggcatcatcagctggggcctgggctgtggacagaaggatgtcccgggtgtgtacaccaaggttaccaactacctagactggattcgtgacaacatgcgaccgtgaccaggaacacccgactcctcaaaagcaaatgagatcccgcctcttcttcttcagaagacactgcaaaggcgcagtgcttctctacagacttctccagacccaccacaccgcagaagcgggacgagaccctacaggagagggaagagtgcattttcccagatacttcccattttggaagttttcaggacttggtctgatttcaggatactctgtcagatgggaagacatgaatgcacactagcctctccaggaatgcctcctccctgggcagaaagtggccatgccaccctgttttcagctaaagcccaacctcctgacctgtcaccgtgagcagctttggaaacaggaccacaaaaatgaaagcatgtctcaatagtaaaagataacaagatctttcaggaaagacggattgcattagaaatagacagtatatttatagtcacaagagcccagcagggcctcaaagttggggcaggctggctggcccgtcatgttcctcaaaagcacccttgacgtcaagtctccttcccctttccccactccctggctctcagaaggtattccttttgtgtacagtgtgtaaagtgtaaatcctttttctttataaactttagagtagcatgagagaattgtatcatttgaacaactaggcttcagcatatttatagcaatccatgttagtttttactttctgttgccacaaccctgttttatactgtacttaataaattcagatatatttttcacagtttttcc

SEQ ID NO: 251 - DNA, 475 bp, Homo sapiens
gaggatgtggctgcagagctgctgctcttgggcactgtggcctgcagcatctctgcacccgcccgctcgcccagccccagcacgcagccctgggagcatgtgaatgcatccaggaggcccggcgtctcctgaacctgagtagagacactgctgctgagatgaatgaaacagtagaagtcatctcagaaatgtttgacctccaggagccgacctgcctacagacccgcctggagctgtacaagcagggcctgcgtggcagtcctcaccaagctcaagggccccttgaccatgatggccagccactacaagcagcactgccctccaaccccggaaacttcctttgcaaccagattatcacctcttgaagtttcaaagagaacctgaaggactttctgcttgtcatccactttgactgctgggagccagtcaggagtgagaccgggcagatgaggctgggcaagctgtggagctgctc

SEQ ID NO: 252 - DNA, 781 bp, Homo sapiens
acacagagagaaaggctaaagttctctggaggatgtggctgcagagcctgctgctcttgggcactgtggcctgcagcatctctgcacccgcccgctcgcccagccccagcacgcagccctgggagcatgtgaatgccatccaggaggcccggcgtctcctgaacctgagtagagacactgctgctgagatgaatgaaacagtagaagtcatctcagaaatgtttgacctccaggagccgacctgcctacagacccgcctggagctgtacaagcagggcctgcggggcagcctcaccaagctcaagggccccttgaccatgatggccagccactacaagcagcactgccctccaaccccggaaacttcctgtgcaacccagattatcacctttgaaagtttcaaagagaacctgaaggactttctgcttgtcatcccctttgactgctgggagccagtccaggagtgagaccggccagatgaggctggccaagccggggagctgctctctcatgaaacaagagctagaaactcaggatggtcatcttggagggaccaaggggtgggccacagccatggtgggagtggcctggacctgccctgggccacactgaccctgatacaggcatggcagaagaatgggaatattttatactgacagaaatcagtaatatttatatatttatatttttaaaatatttatttatttatttatttaagttcatattccatatttattcaagatgttttaccgtaataattattattaaaaatatgcttcta

SEQ ID NO: 253 - DNA, 347 bp, Homo sapiens
  modified_base (24)..(24): a, c, t or g
  modified_base (75)..(75): a, c, t or g
  modified_base (93)..(93): a, c, t or g
  modified_base (206)..(206): a, c, t or g
  modified_base (224)..(224): a, c, t or g
  modified_base (237)..(237): a, c, t or g
  modified_base (262)..(262): a, c, t or g
  modified_base (319)..(319): a, c, t or g
  modified_base (325)..(325): a, c, t or g
  modified_base (330)..(330): a, c, t or g
cagactccagtgtccacagatganggggtggggcggaggtagggcgggggcaggagtgggaccaggggcggggtnaggggggggaatccagtntcagactctgcagcaagacgtcaggtggggggaccagcaggggaggcgggaggtaaaaatagctccggccagccgaccctcggagccttttcccaggctgggccttgggcttnggtccaggagctattctngggcctgggagantcacattccctggaggaaggccccntcccacccacccaccctccctctccttccctcccggaagcaggcagccattttgggnccctgnccttnccggcaaaggaaggaaa

SEQ ID NO: 254 - DNA, 2448 bp, Homo sapiens
ggccgagctgcagcccgggctcagtctccgccgccgccgtgaacatggagcccccggacgcaccggcccaggcgcgcggggccccgcggctgctgttgctcgcagtcctgctggcggcgcacccagatgcccaggcggaggtgcgcttgtctgtacccccgctggtggaggtgatgcgaggaaagtctgtcattctggactgcacccctacgggaacccacgaccattatatgctggaatggttccttaccgaccgctcgggagctcgcccccgcctagcctcggctgagatgcagggctctgagctccaggtcacaatgcacgacacccggggccgcagtcccccataccagctggactcccaggggcgcctggtgctggctgaggcccaggtgggcgacgagcgagactacgtgtgcgtggtgagggcaggggcggcaggcactgctgaggccactgcgcggctcaacgtgtttgcaaagccagaggccactgaggtctcccccaacaaagggacactgtctgtgatggaggactctgcccaggagatcgccacctgcaacagccggaacgggaacccggcccccaagatcacgtggtatcgcaacgggcagcgcctggaggtgcccgtagagatgaacccagagggctacatgaccagccgcacggtccgggaggcctcgggcctgctctccctcaccagcaccctctacctgcggctccgcaaggatgaccgagacgccagcttccactgcgccgcccactacagcctgcccgagggccgccacggccgcctggacagccccaccttccacctcaccctgcactatcccacggagcacgtgcagttctgggtgggcagcccgtccaccccagcaggctgggtacgcgagggtgacactgtccagctgctctgccggggggacggcagccccagcccggagtatacgcttttccgccttcaggatgagcaggaggaagtgctgaatgtgaatctcgaggggaacttgaccctggagggagtgacccggggccagagcgggacctatggctgcagagtggaggattacgacgcggcagatgacgtgcagctctccaagacgctggagctgcgcgtggcctatctggaccccctggagctcagcgaggggaaggtgctttccttacctctaaacagcagtgcagtcgtgaactgctccgtgcacggcctgcccacccctgccctacgctggaccaaggactccactcccctgggcgatggccccatgctgtcgctcagttctatcaccttcgattccaatggcacctacgtatgtgaggcctccctgcccacagtcccggtcctcagccgcacccagaacttcacgctgctggtccaaggctcgccagagctaaagacagcggaaatagagcccaaggcagatggcagctggagggaaggagacgaagtcacactcatctgctctgcccgcggccatccagaccccaaactcagctggagccaattggggggcagccccgcagagccaatccccggacggcagggttgggtgagcagctctctgaccctgaaagtgaccagcgccctgagccgcgatggcatctcctgtgaagcctccaacccccacgggaacaagcgccatgtcttccacttcggcaccgtgagcccccagacctcccaggctggagtggccgtcatggccgtggccgtcagcgtgggcctcctgctcctcgtcgttgctgtcttctactgcgtgagacgcaaagggggcccctgctgccgccagcggcgggagaagggggctccgccgccaggggagccagggctgagccactcggggtcggagcaaccagagcagaccggccttctcatgggaggtgcctccggaggagccaggggtggcagcgggggcttcggagacgagtgctgagccaagaacctcctagaggctgtccctggacctggagctgcaggcatcagagaaccagccctgctcacgccatgcccgcccccgccttccctcttccctcttccctctccctgcccagccctcccttccttcctctgccggcaaggcagggacccacagtggctgcctgcctccgggagggaaggagagggagggtgggtgggtgggagggggccttcctccagggaatgtgactctcccaggccccagaatagctcctggacccaagcccaaggcccagcctgggacaaggctccgagggtcggctggccggagctatttttacctcccgcctcccctgctggtccccccacctgacgtcttgctgcagagtctgacactggattcccccccctcaccccgcccctggtcccactcctgcccccgccctacctccgccccaccccatcatctgtggacactggagtctggaataaatgctgtttgtcacatcaacaccaaaaaaaaaaaaaaaaaa

SEQ ID NO: 255 - DNA, 442 bp, Homo sapiens
  modified_base (3)..(3): a, c, t or g
  modified_base (5)..(5): a, c, t or g
  modified_base (8)..(8): a, c, t or g
  modified_base (61)..(61): a, c, t or g
  modified_base (64)..(64): a, c, t or g
  modified_base (126)..(126): a, c, t or g
  modified_base (305)..(305): a, c, t or g
  modified_base (348)..(348): a, c, t or g
  modified_base (365)..(365): a, c, t or g
  modified_base (377)..(377): a, c, t or g
  modified_base (390)..(390): a, c, t or g
  modified_base (397)..(397): a, c, t or g
  modified_base (425)..(425): a, c, t or g
  modified_base (434)..(434): a, c, t or g
  modified_base (440)..(440): a, c, t or g
aangnaanaacaatcctttatcatttatactgtattctcacgttacattatttcatttganccncacaacagccctgtgaggtaggtagggttatgtattactgttatgcctatttcacagatgangaaatggaggtggctcagtgaggtgagtgacttgcataaagtcacacagcatgttagtggcttcactgcttctgcaacttctctaaagtcaagctgcttggattagggagcaccgaaaagatggacagttttatggaaaaggagaaagggcagtgggtgatttgtaaggatttcttccncaaattgttttgttatgaccacagctttctgctaacttggggntaaactagggttctccntgaggggggctntcccaagtacccntgggccngggggacagctgtctttttttgggggtnggagtcccnccgcanat

SEQ ID NO: 256 - DNA, 347 bp, Homo sapiens
  modified_base (2)..(3): a, c, t or g
  modified_base (10)..(10): a, c, t or g
  modified_base (15)..(15): a, c, t or g
  modified_base (172)..(172): a, c, t or g
  modified_base (213)..(213): a, c, t or g
  modified_base (240)..(240): a, c, t or g
  modified_base (269)..(269): a, c, t or g
  modified_base (292)..(292): a, c, t or g
  modified_base (301)..(301): a, c, t or g
  modified_base (322)..(322): a, c, t or g
tnntggcaanaaacntttctcaggctttattgggctttatttgtgggagaagggggctggtcccaggtttttgcagtgcaaagccagggcgccacctgctggtagccctcaggtgtaggttcgaagctgctggggcccccgggggtttgggacacaggagaatttcaggctntgagtggagacagttactgccacgattccacaggcaagttnttcacctcaaagatctcctgcaccgantggtgaaagtggtcgtaggtgaggcgcanttttagccgcagggggggccttnttaggattnaggattctgaagagctgggtnataggaaggccaccccgagctggaa

SEQ ID NO: 257 - DNA, 425 bp, Homo sapiens
  modified_base (55)..(55): a, c, t or g
  modified_base (193)..(193): a, c, t or g
  modified_base (363)..(363): a, c, t or g
  modified_base (368)..(368): a, c, t or g
  modified_base (397)..(397): a, c, t or g
  modified_base (414)..(414): a, c, t or g
  modified_base (420)..(420): a, c, t or g
gtcaaagtgtttgagcgtgagggagtacagctgaatctgtctttcattcgacccnctgaaaaccctgctttgctgttaatcaccatcactgccaccaacttctcagagggtgatgtcacccatttcatctgccaggctgctgtgcccaagagtctccagctgcagctgcaggcccccagtgggaacacagttncagctcggggtggccttcctatcacccagctcttcagaatcctcaatcctaacaaggcccccctggcggctaaagctgcgcctcacctacggaccactttcaccagtcggtgcaggagatctttgaggtgaacaactttgcctgtgggaattcgtgggcagtaactgttntccantcaacagcctggaaatttttcctgtgttnccaaatcccaggggggncccagnaggtt

SEQ ID NO: 258 - DNA, 3305 bp, Homo sapiens
aaaaaaaatatattaataaaaaagttcaaaaaaggggggggattgtcatctcctttggggtgcgatggcttcaaatccaaactgaggctctccgggtggtaaggatgtgcgaggaggcctcttgaagaactccaggcctatcatgctgtctctccgctaaagcctgaggcccgaggtcagaggattcaggaaggctctgcagtcggcccaggagggcggggtcccgtggtggaggcggggagagggaaggaccgcacggagcaccaacccctgctcggccccgtaccaggaagcgctggggggcagaggagcggagttgaggcagaagccaggtgaggctggagtcctggggtaggcaggctgtcgctgccgctgccgctgcctgagatggaaatcgggggaggaagctcgcggaagaaacagcggagggttcgtggaaaaaaaagcaatggctgagctaagggatggggtaccaggttagggggaggaaacggtagagagaaataggtggggctcccgcgcatgctcaatagggaaggggcgcccgtggggtgcggacgcatgcgtagtgggcttctcgggcggtggggtgggcgcggaatttggagacccacttcgggaaaggtaaaatgcgggcgcaattttagggtacctgtgggacccgggctcttagggtcttgacacaggacgggcctgggccgaaagcccaggcacgcccgaccagagagtgtttctccactcccggactctgccagtcaggatggtggtgccttcgctgaagcttcaggacctcatcgaagagattcgcggggccaagactcaggcccaggagcgggaggtgatccaaaaggagtgtgcccacatccgggcctccttccgcgacggggacccagtgcacaggcaccggcagctggccaaactgctctacgtccacatgttgggctaccccgcccactttggacagatggagtgcctgaaactgatcgcctcctccagattcacagacaagagggtgggctacctgggggccatgcttctattggatgagaggcacgatgcccacctgctcattaccaacagcatcaagaatgacctgagccaggggattcagccagtacaaggcctggccttgtgcactttgagcaccatgggctctgctgagatgtgccgagacctggccccagaggtggagaaactgctcctgcagcccagtccctacgtgcgcaagaaggctattctgactgcagtgcacatgatccggaaggtccctgaactctccagtgtcttcctcccaccctgtgcccaactgcttcatgagcgtcaccatggcatcctgctgggcaccatcacgctgatcacggagctctgcgaacgaagccctgcagccctcaggcacttccgaaaggtggtaccccagctggtacacatcctccggactctggtgacaatgggatactccacagaacacagcatatctggagtcagcgaccccttcctgcaggtccagatacttcgtctgcttcggatcctgggccggaaccacgaggagagcagtgagaccatgaatgacttgctggcccaggtggccactaacacggacaccagccgaaatgccggaaatgcggtcctgtttgagacagtactcaccatcatggatatccgctctgcagctggcctacgggttctagctgtcaacattcttggtcgcttcctactcaacagtgacaggaacattaggtatgtggccctgacatcactgcttcgactggtgcagtctgatcacagtgctgtgcagcggcatcggcccactgtggtggaatgtctacgggaaactgatgcctccctcagccggagagccctggaactaagcctggctctggtaaatagctccaatgtgcgagccatgatgcaagagctgcaggcctttctggagtcctgccctcctgacctacgggctgactgtgcctcaggcatcctgctggctgcagagaggtttgctccaaccaaacgctggcacatagacaccatcctgcatgtgctgacaacggcgggcacccatgtgcgggatgatgcagtggccaacctgacccagctgattgggggggcccaggagctacatgcctactctgtgcgccgcctctacaatgccctggcagaagacatttcccagcaaccactggtgcaggtggcagcctggtgcattggggagtatggggacctcctgctggcagggaactgcgaggagattgagccccttcaggtggacgaagaggaagtgctggcattgctggaaaaggtgctgcagtcccacatgtccctgccagccactcgaggatatgccctcacagccctcatgaagctcagcactcgcctctgtggggacaacaaccgcatccgccaggtggtgtccatctacgggagctgcttggacgtggagctgcagcagcgggctgtggagtatgacacactcttccggaaatacgaccacatgagggctgccatcctggaaaaaatgcctcttgtggagcgagatggccctcaggctgatgaggaagcaaaggaaagcaaagaagcagcccagctttcagaagcagccccagtgcccacagagccccaggcctcacagctcctggatctgctagatctcctggatggggcttctggggatgtccagcatcctccccatctggacccctccccaggaggtgccctggtacacctgcttgaccttccctgtgtacctccacccccagctcccatcccagatctcaaagtgtttgagcgtgagggagtacagctgaatctgtctttcattcgaccccctgaaaaccctgctttgctgttaatcaccatcactgccaccaacttctcagagggtgatgtcacccatttcatctgccaggctgctgtgcccaagagtctccagctgcagctgcaggcccccagtgggaacacagttccagctcggggtggccttcctatcacccagctcttcagaatcctcaatcctaacaaggcccccctgcggctaaagctgcgcctcacctacgaccactttcaccagtcggtgcaggagatctttgaggtgaacaacttgcctgtggaatcgtggcagtaactgtctccactcacagcctgaaattctcctgtgtcccaaaccccagggggccccagcagcttcgaacctacacctgagggctaccagcaggtggcgctctggctttgcactgcaaaaactggggaccagcccccttctcccacaaataaagcccaataaagcctgagaagtgaggaaagccaaaaaa

SEQ ID NO: 259 - DNA, 455 bp, Homo sapiens
  modified_base (384)..(384): a, c, t or g
  modified_base (424)..(424): a, c, t or g
  modified_base (448)..(448): a, c, t or g
accaacccatgcaagaccatgaagttcatcgtgtggcgccgctttaagtgggtcatcatcggcttgctgttcctgcttatcctgctgctcttcgtggccgtgctcctctactctttgccgaactatttgtcaatgaagattgtaaagccaaatgtgtaacaaaggcaaaggcttcatttcaagagtcatccagcaatgagagaatcctgcctctgtagaccaacatccagtgtgattttgtgtctgagaccacaccccagtagcaggttacgccatgtcaccgagccccattgattcccagaggttcttagtcctgggaaagtcaggccaacaagcaacgtttgcatcatgttatctcttaagtattaaaagttttattttctnaagtttaaatcatggttttttcaaatattttttcaaggtngctgggtcccttttaaaaaatcanctttttt

SEQ ID NO: 260 - DNA, 6829 bp, Homo sapiens
cttctctcccagggcggtgcgacccggagctccagcgcccgagtctccacttcgtttgctgaaacttgctttctaccagctaagaaccatgctgcgagtgattgtggaatctgccagcaatatccctaaaacgaaatttggcaagccggatcctattgtttctgtcatttttaaggatgagaaaaagaaaacaaagaaagttgataatgaattgaaccctgtctggaatgagattttggagtttgacttgaggggtataccactggacttttcatcttcccttgggattattgtgaaagattttgagacaattggacaaaataaattaattggcacggcgactgtagccctgaaggacctgactggtgaccagagcagatccctgccgtacaagctgatctccctgctaaatgaaaaagggcaagatactggggccaccattgacttggtgatcggctatgatccgccttctgctccacatccaaatgacctgagcgggcccagcgtgccaggcatgggaggagatggggaagaagatgaaggtgatgaagacaggttggacaatgcagtcaggggccctgggcccaaggggccagttgggacggtgtcggaagctcagcttgctcggaggctcaccaaagtaaagaacagccggcggatgctgtcaaataagccacaggacttccagatccgcgtccgagtgattgagggccgacagttaagtggtaacaacataaggcctgtggtcaaagttcacgtctgtggccagacacaccgaacaagaatcaagagaggaaacaaccctttttttgatgagttgtttttctacaatgtcaacatgaccccttctgaattgatggatgagatcatcagcatccgggtttataattctcactctctgcgggcagattgtctgatgggggaatttaagattgatgttggatttgtttatgatgaacctggccatgctgtcatgagaaagtggcttcttctcaatgacccggaagataccagttcaggttctaaaggttatatgaaagtcagcatgtttgtcctgggaaccggagatgagcctcctcctgagagacgagatcgtgataatgacagtgatgatgtggagagtaatttgttactccctgctggcattgccctccggtgggtgaccttcttgctgaaaatctaccgagctgaggacatcccccagatggatgatgccttctcacagacagtaaaggaaatatttggaggcaatgcagataagaaaaatctcgtggatccttttgtagaagtttcctttgctggaaaaaaggtttgtacaaacataattgagaaaaatgcaaacccagagtggaatcaggtcgtcaatcttcagatcaagtttccttcagtgtgtgaaaaaataaaactaacaatatatgactgggaccgtcttactaaaaatgatgtagttggaacaacatatctacacctctctaaaattgctgcctctggtggggaagtggaagatttctcatcttcgggaactggggctgcatcatatacagtaaacacaggagaaacagaggtaggctttgttccaacgtttggaccttgttacctgaatctttatggaagccccagggagtacacgggattcccagacccctatgatgagctgaatactggaaagggggaaggagttgcctacagaggcaggatcttggttgaattagccacttttcttgagaagacaccaccagataaaaagcttgagcccatttcaaatgatgacctgctggttgttgagaaataccagcgaaggcggaagtacagcctgtctgccgtgtttcattcagccaccatgttgcaagatgttggtgaggccattcagtttgaagtcagcattgggaactatggcaacaagtttgacaccacctgtaagcctttggcatcaacaactcagtacagccgtgctgtatttgatggcaactactattattacttgccttgggcccacaccaagccagttgttaccctgacttcatactgggaggatattagtcatcgcctggatgcggtgaacactctcctagctatggcagaacggctgcaaacaaatatagaagctctaaaatcagggatacaaggtaaaattcctgcaaaccagctggctgaattgtggctgaagctgatagatgaagttatagaagacacgagatacacgttgcctctcacagaaggaaaagccaacgtcacagttctcgatactcagatccgaaagctgcggtccaggtctctctcccaaatacatgaggcggctgtgaggatgaggtcggaagccacagatgtgaagtccacactggcagaaattgaggactggcttgataaattaatgcagctgactgaagagccacagaacagcatgcctgacatcatcatctggatgatccggggagagaagagactggcctatgcacgaattcccgcacatcaggtcttgtactccaccagtggtgagaatgcatctggaaaatactgtgggaaaacccaaaccatctttctgaagtatccacaggagaaaaacaacgggccaaaggtgcctgtggagttgcgagtgaacatctggctaggcttaagtgctgtggagaagaagtttaacagcttcgcagaaggaactttcaccgtctttgctgaaatgtatgaaaatcaagctctcatgtttggaaaatggggtacttctggattagtaggacgtcataagttttctgatgtcacaggaaaaataaaactcaagagggaattttttctgcctccaaaaggctgggaatgggaaggagagtggatagttgatcctgaaagaagcttgctgactgaggcagatgcaggtcacacggagttcactgatgaagtctatcagaacgagagccgctaccccgggggcgactggaagccggccgaggacacctacacggatgcgaacggcgataaagcagcatcacccagcgagttgacttgtcctccaggttgggaatgggaagatgatgcatggtcttatgacataaatcgagcggtggatgagaaaggctgggaatatggaatcaccattcctcctgatcataagcccaaatcctgggttgcagcagagaaaatgtaccacactcatagacggcgaaggctggtccgaaaacgcaagaaagatttaacacagactgcttcaagcaccgcaagggccatggaggaattgcaagaccaagagggctgggaatatgcttctctaattggctggaaatttcactggaaacaacgtagttcagataccttccgccgcagacgctggaggagaaaaatggctccttcagaaacacatggtgcagctgccatctttaaacttgaaggtgcccttggggcagacactaccgaagatggggatgagaagagcctggagaaacagaagcacagtgccaccactgtgttcggagcaaacacccccattgtttcctgcaattttgacagagtctacatctaccatctgcgctgctatgtctatcaagccagaaacctcttggctttagataaggatagcttttcagatccatatgctcatatctgtttcctccatcggagcaaaaccactgagatcatccattcaaccctgaatcccacgtgggaccaaacaattatattcgatgaagttgaaatctatggggaaccccaaacagttctacagaatccacccaaagttatcatggaactttttgacaatgaccaagtgggcaaagatgaatttttaggacgaagcattttctctcctgtggtgaaactgaactcagaaatggacatcacacccaaacttctctggcacccagtaatgaatggagacaaagcctgcggggatgttcttgtaactgcagagctgattctgaggggcaaggatggctccaaccttcccattcttccccctcaaagggcgccaaatctatacatggtcccccaggggatcaggcctgtggtccagctcactgccattgagattctagcttggggcttaagaaatatgaaaaacttccagatggcttctatcacatcccccagtcttgttgtggagtgtggaggagaaagggtggaatcggtggtgatcaaaaaccttaagaagacacccaactttccaagttctgttctcttcatgaaagtgttcttgcccaaggaggaattgtacatgcccccactggtgatcaaggtcatcgaccacaggcagtttgggcggaagcctgtcgtcggccagtgcaccatcgagcgcctggaccgctttcgctgtgacccttatgcagggaaagaggacatcgtcccacagctcaaagcctcccttctgtctgccccaccatgccgggacatcgttatcgaaatggaagacaccaaaccattactggcttctaagctgacagaaaaggaggaagaaatcgtggactggtggagtaaattttatgcttcctcaggggaacatgaaaaatgcggacagtatattcagaaaggctattccaagctcaagatatataattgtgaactagaaaatgtagcagaatttgagggcctgacagacttctcagatacgttcaagttgtaccgaggcaagtcggatgaaaatgaagatccttctgtggttggagagtttaagggctcctttcggatctaccctctgccggatgaccccagcgtgccagcccctcccagacagtttcgggaattacctgacagcgtcccacaggaatgcacggttaggatttacattgttcgaggcttagagctccagccccaggacaacaatggcctgtgtgacccttacataaaaataacactgggcaaaaaagtcattgaagaccgagatcactacattcccaacactctcaacccagtctttggcaggatgtacgaactgagctgctacttacctcaagaaaaagacctgaaaatttctgtctatgattatgacacctttacccgggatgaaaaagtaggagaaacaattattgatctggaaaaccgattcctttcccgctttgggtcccactgcggcataccagaggagtactgtgtttctggagtcaatacctggcgagatcaactgagaccaacacagctgcttcaaaatgtcgccagattcaaaggcttcccacaacccatcctttccgaagatgggagtagaatcagatatggaggacgagactacagcttggatgaatttgaagccaacaaaatcctgcaccagcacctcggggcccctgaagagcggcttgctcttcacatcctcaggactcaggggctggtccctgagcacgtggaaacaaggactttgcacagcaccttccagcccaacatttcccagggaaaacttcagatgtgggtggatgttttccccaagagtttggggccaccaggccctcctttcaacatcacaccccggaaagccaagaaatactacctgcgtgtgatcatctggaacaccaaggacgttatcttggacgagaaaagcatcacaggagaggaaatgagtgacatctacgtcaaaggctggattcctggcaatgaagaaaacaaacagaaaacagatgtccattacagatctttggatggtgaagggaattttaactggcgatttgttttcccgtttgactaccttccagccgaacaactctgtatcgttgcgaaaaaagagcatttctggagtattgaccaaacggaatttcgaatcccacccaggctgatcattcagatatgggacaatgacaagttttctctggatgactacttgggtttcctagaacttgacttgcgtcacacgatcattcctgcaaaatcaccagagaaatgcaggttggacatgattccggacctcaaagccatgaacccccttaaagccaagacagcctccctctttgagcagaagtccatgaaaggatggtggccatgctacgcagagaaagatggcgcccgcgtaatggctgggaaagtggagatgacattggaaatcctcaacgagaaggaggccgacgagaggccagccgggaaggggcgggacgaacccaacatgaaccccaagctggacttaccaaatcgaccagaaacctccttcctctggttcaccaacccatgcaagaccatgaagttcatcgtgtggcgccgctttaagtgggtcatcatcggcttgctgttcctgcttatcctgctgctcttcgtggccgtgctcctctactctttgccgaactatttgtcaatgaagattgtaaagccaaatgtgtaacaaaggcaaaggcttcatttcaagagtcatccagcaatgagagaatcctgcctctgtagaccaacatccagtgtgattttgtgtctgagaccacaccccagtagcaggttacgccatgtcaccgagccccattgattcccagagggtcttagtcctggaaagtcaggccaacaagcaacgtttgcatcatgttatctcttaagtattaaaagttttattttctaaagtttaaatcatgtttttcaaaatatttttcaaggtggctggttccatttaaaaatcatctttttatatgtgtcttcggttctagacttcagcttttggaaattgctaaatagaattcaaaaatctctgcatcctgaggtgatatacttcatatttgtaatcaactgaaagagctgtgcattataaaatcagttagaatagttagaacaattcttatttatgcccacaaccattgctatattttgtatggatgtcataaaagtctatttaacctctgtaatgaaactaaataaaaatgtttcacctttaaaaaaaaaaaaaaaaaaaaaa

SEQ ID NO: 261 - DNA, 426 bp, Homo sapiens
  modified_base (21)..(21): a, c, t or g
  modified_base (23)..(23): a, c, t or g
  modified_base (156)..(156): a, c, t or g
  modified_base (172)..(172): a, c, t or g
  modified_base (294)..(294): a, c, t or g
  modified_base (387)..(387): a, c, t or g
ttatatatatatatctatatntntgtccaaaccaaccgcacatgcagatggggctcccgccgttggtgttatttaaagaagaaacgtctatgtgtacagatgaatgataaactctctgcttctccctctgcccctctccaggcgccggcgggcggnccgtttttcgaagttnatgcaatcggtttaaacatggctgaacgcgtgtgtacacgggactgacgcaacccacgtgtaactgtcagccgggccctgagtaatcgcttaaagatgttcctacgggctttttgctggttnatgttttgtttttgtttttggtttttttgggtctttttttttgtaattataaaaaataattctattttctattgaggaaaagaggccgtcttntatatttttggggaattcttttcccgtttcaagcatttt

SEQ ID NO: 262 - DNA, 1837 bp, Homo sapiens
gagccgcgcacgggactgggaaggggacccacccgagggtccagccaccagccccctcactaatagcggccaccccggcagcggcggcagcagcagcagcgacgcagcggcgacagctcagagcagggaggccgcgccacctgcgggccggccggagcgggcagccccaggccccctccccgggcacccgcgttcatgcaacgcctggtggcctgggacccagcatgtctccccctgccgccgccgccgcctgcctttaaatccatggaagtggccaacttctactacgaggcggactgcttggctgctgcgtacggcggcaaggcggcccccgcggcgccccccgcggccagacccgggccgcgcccccccgccggcgagctgggcagcatcggcgaccacgagcgcgccatcgacttcagcccgtacctggagccgctgggcgcgccgcaggccccggcgcccgccacggccacggacaccttcgaggcggctccgcccgcgcccgcccccgcgcccgcctcctccgggcagcaccacgacttcctctccgacctcttctccgacgactacgggggcaagaactgcaagaagccggccgagtacggctacgtgagcctggggcgcctgggggccgccaagggcgcgctgcaccccggctgcttcgcgcccctgcacccaccgcccccgccgccgccgccgcccgccgagctcaaggcggagccgggcttcgagcccgcggactgcaagcggaaggaggaggccggggcgccgggcggcggcgcaggcatggcggcgggcttcccgtacgcgctgcgcgcttacctcggctaccaggcggtgccgagcggcagcagcgggagcctctccacgtcctcctcgtccagcccgcccggcacgccgagccccgctgacgccaaggcgcccccgaccgcctgctacgcgggggccgcgccggcgccctcgcaggtcaagagcaaggccaagaagaccgtggacaagcacagcgacgagtacaagatccggcgcgagcgcaacaacatcgccgtgcgcaagagccgcgacaaggccaagatgcgcaacctggagacgcagcacaaggtcctggagctcacggccgagaacgagcggctgcagaagaaggtggagcagctgtcgcgcgagctcagcaccctgcggaacttgttcaagcagctgcccgagcccctgctcgcctcctccggccactgctagcgcggcccccgcgcgcgtccccctgccggccggggctgagactccggggagcgcccgcgcccgcgccctcgcccccgcccccggcggcgccggcaaaactttggcactggggcacttggcagcgcggggagcccgtcggtaattttaatattttattatatatatatatctatatttttgtccaaaccaaccgcacatgcagatggggctcccgcccgtggtgttatttaaagaagaaacgtctatgtgtacagatgaatgataaactctctgcttctccctctgcccctctccaggcgccggcgggcgggccggtttcgaagttgatgcaatcggtttaaacatggctgaacgcgtgtgtacacgggactgacgcaacccacgtgtaactgtcagccgggccctgagtaatcgcttaaagatgttcctacgggcttgttgctgttgatgttttgttttgttttgttttttggtctttttttgtattataaaaaataatctatttctatgagaaaagaggcgtctgtatattttgggaatcttttccgtttcaagcattaagaacacttttaataaacttttttttgagaatggttacaaagcc

SEQ ID NO: 263 - DNA, 468 bp, Homo sapiens
  modified_base (13)..(13): a, c, t or g
  modified_base (149)..(149): a, c, t or g
  modified_base (386)..(386): a, c, t or g
  modified_base (451)..(451): a, c, t or g
aattcttgggttnttttgaagtctttgcaagcacagctcgtttctgcagattattttccaaacgtgtacaaaatggaaccaaaacggagaatcccttaagaacctgaagaggcgcaacattaaaagctacgattatccagtagcaagtnttccagccttcagttgccagccgcttcctcctcttattcccaagattagcgggatgaaaacgtcttccccgtgattgttttcatttcttttttctcggcatctgggcgtgcgcggttcagcaccttgaggaagtcagacgttttcgcccgcatacgtgtgtgaatatagggccttagagcacttgatgtgggtaggtgcaggtagtcccggaacgtgtgggattcaggttgatgggngttgttctcgagcactgggcattgggtgtgacgaggggaacagcacaaaggtaatgtaggccatntttgttcacccacagcg

SEQ ID NO: 264 - DNA, 1462 bp, Homo sapiens
ggccggctagagccgggggctgggcggggaccgggcttgtcggtgaagcggcagtggcggcggcggcggcggctcggcaggcgggttcaggcttcgggggccagccgccgccatgatcctgctggaggtgaacaaccgcatcatcgaggagacgctcgcgctcaagttcgagaacgcggccgccggaaacaaaccggaagcagtagaagtaacatttgcagatttcgatggggtcctctatcatatttcaaatcctaatggagacaaaacaaaagtgatggtcagtatttctttgaaattctacaaggaacttcaggcacatggtgctgatgagttattaaagagggtgtacgggagtttcttggtaaatccagaatcaggatacaatgtctctttgctatatgaccttgaaaatcttccggcatccaaggattccattgtgcatcaagctggcatgttgaagcgaaattgttttgcctctgtctttgaaaaatacttccaattccaagaagagggcaaggaaggagagaacagggcagttatccattatagggatgatgagaccatgtatgttgagtctaaaaaggacagagtcacagtagtcttcagcacagtgtttaaggatgacgacgatgtggtcattggaaaggtgttcatgcaggagttcaaagaaggacgcagagccagccacacagccccacaggtcctctttagccacagggaacctcctctggagctgaaagacacagacgccgctgtgggtgacaacattggctacattacctttgtgctgttccctcgtcacaccaatgccagtgctcgagacaacaccatcaacctgatccacacgttccgggactacctgcactaccacatcaagtgctctaaggcctatattcacacacgtatgcgggcgaaaacgtctgacttcctcaaggtgctgaaccgcgcacgcccagatgccgagaaaaaagaaatgaaaacaatcacggggaagacgttttcatcccgctaatcttgggaataagaggaggaagcggctggcaactgaaggctggaacacttgctactggataatcgtagcttttaatgttgcgcctcttcaggttcttaagggattctccgttttggttccattttgtacacgtttggaaaataatctgcagaaacgagctgtgcttgcaaagacttcatagttcccaagaattaaaaaaaaaaaaaaaagaattccacttgatcaacttaattccttttctttatcttccctccctcacttcccttttctcccaccctcttttccaagctgtttcgctttgcaatatattactggtaatgagttgcaggataatgcagtcataacttgttttctcctaagtatttgagttcaaaactcctgtatctaaagaaatacggttggggtcattaataaagaaaatctttctatcttaaaaaaaaaaaaaaa

SEQ ID NO: 265 - DNA, 400 bp, Homo sapiens
  modified_base (13)..(14): a, c, t or g
  modified_base (17)..(17): a, c, t or g
  modified_base (46)..(46): a, c, t or g
  modified_base (260)..(260): a, c, t or g
  modified_base (337)..(337): a, c, t or g
  modified_base (359)..(359): a, c, t or g
aatctgaacattnnttnagtatacaagttcgctaaacagaagtggnaaaaattgaatgttatgtattatggaattcagtacatcagtttacttcggtagccagtgattgttatagttaattctgcaaaaaaacaaaaccagttatgcaaaaacaagagtacaaaatgcccctttctgaagctcagtttgagaaactgatttcgtatctagcttattgattatactcagtttcaattctccctgtgcaaataatacataangtcattaatgatgatttgatgaactgaaatcatcttcgcttagggatcgtttgacatcataacccaaatataaaagngttattcaaggttcacaggggntaaaacagtgcctcggggaacataatttcacccctgtatat

SEQ ID NO: 266 - DNA, 270 bp, Homo sapiens
  modified_base (21)..(21): a, c, t or g
  modified_base (25)..(25): a, c, t or g
  modified_base (27)..(27): a, c, t or g
  modified_base (29)..(29): a, c, t or g
  modified_base (148)..(148): a, c, t or g
tattcttgtggttaaaaaccngccnanantaaattgggcttcaatcactgtaacctgattcatcctgggatgtaaaccattcgaagtcagctaattggacttttatggctctatcttttccttcagtgaagaaccctatttaaaactnggtcatcatttgtcctgttctagcaagatagtcttcagtttcattttcctgtgccctgtggtagttggaaacaaatcataatgtattatttaaatgtttaacatcattgcataacagcgttt

SEQ ID NO: 267 - DNA, 3423 bp, Homo sapiens
cggctcgctggtaccggcagtgccatggcggccttcagcaagtacttgacggcgcggaactcctcgctggctggtgccgcgttcctgctgctctgcctgctccacaagcggcgccgcgccctcggcctgcacggtaagaaaagtggaaaaccaccattacagaacaatgagaaagaggggaaaaaagagcgagctgtggtggacaaggtgtttttctcaaggctcatacagattctgaaaatcatggtccctagaacattttgtaaagagacaggttacttggtacttattgctgttatgctggtgtctcgaacatattgtgatgtttggatgattcaaaatgggacactaattgaaagtggtatcattggtcgtagcaggaaagatttcaagagatacttactcaacttcatcgctgccatgcctcttatctctctggttaataacttcttgaagtatgggttaaatgagcttaaactgtgcttccgagtaaggctcactaaatacctctatgaggagtatcttcaagctttcacatattataaaatggggaatctggacaacagaatagctaatccagaccagctgcttacacaagatgtagaaaaattttgtaacagtgtagtcgatctgtattcaaatcttagtaagccatttttagacatagttttgtatatctttaagttaacgagtgcaattggagctcagggcccagcgagcatgatggcctacttggttgtttctgggctattcctaactcgacttcgaagacccattggtaagatgacaataactgagcaaaagtatgaaggagaatatagatatgttaattctcggctcatcacaaacagtgaagaaattgccttttacaatgggaataaaagagaaaagcagacagtccactcagtcttccgaaaactggtggaacacctacataatttcattttgtttcggttttcaatgggcttcattgatagtattattgccaaataccttgccactgttgttggttacctagttgtcagtcgccctttcttagatttgtctcatcctcgacatctcaagagtacacattcggaacttctagaggattactaccaaagtggaagaatgcttttgcgaatgtctcaagctctgggtcgaatagttttggctgggcgtgaaatgactagattggccggttttactgctcggattacagaattaatgcaagtactgaaggatttaaatcatggcaaatatgagcgcacaatggtctcacaacaggaaaagggtattgaaggagtacaagtcattcccttgatacctggtgctggagaaatcattattgcagataacattataaagtttgatcatgttcctttagcaacgccaaatggagatgttttgatccgagaccttaattttgaagttcgatctggggctaatgttctaatttgtggtccaaatggctgcggaaagagttcacttttccgtgttcttggtgaattatggcctctttttggaggacgtctaactaaacctgaaagaggaaaattattttatgttcctcagagaccttacatgacccttggaacacttcgagatcaagtgatatatccagatggacgagaagatcagaaaaggaagggaatttctgacctagtactgaaggaatacttagacaatgtccagttgggtcatatccttgaacgtgaaggaggctgggacagtgttcaggattggatggacgtactcagtggtggagaaaagcaaagaatggcgatggcaagattattttatcataaaccccagtttgccattttggatgaatgcacaagtgcagttagtgtcgacgtggaaggctacatttatagtcattgtcgaaaggttggcatcactctcttcactgtgtctcataggaaatctctttggaaacatcatgagtactacctgcatatggatggcagaggcaactatgaattcaaacagataacagaagatacagttgagtttggctcttagagaaatctggagaactatacctgcttcagtgaaataattacagaatatacttagaaaggcaaagtacattgtaaaataaagttgagcttagttttttttaaaaaaaaaaaacaaagcaacaaattaactagatacagaataatggagaacaagttgttaaaacatttaatattatataggatattgctaattgtgtatatgttggtttaattaataatatgtactaagaatgtccttattcttgtggttaaaaacctgcctaaattaaattgggcttcaatcactgtaacctgattcatcctgggatgtaaaccattcgaagtcagctaattggacttttatggctctatcttttccttcagtgaagaaccctatttaaaactgggtcatcatttgtcctgttctagcaagatagtcttcagtttcattttcctgtgccctgtggtagttggaaacaaatcataatgtattatttaaatgtttaacatcattgcataacagcgtttattatacagtggcagatttctttagctgccacagtaatactcattccttgtgtgtgtcttggagtgcatttgactccaggaaaagccattttggttttccttaactaaatgataaatgtacccctctcagtctgcagtattgagttgtttaaagtatatgtgcagtcttgcttacaaggaggggttaccatgtatcacacctaatcttcccaatgtttgggatattaaaacacaaagtccttaacatgccaggctcaaggtcttataagagttctagatttttaagagaattagacaaatttgtgtgtgttagaagcccattcattagaagtgtggtggttatttggtattaaactccaaatgagccataggaaggcactacatgaaataatgcactgagtatgcaatgctatcactgtctttgactgtgattttatgtttaaaaagtatgttctaaaattattatatatacatgggtgaattatgtttccgaggcactgttttatctctgtgaatcttgaataacttttttatatttgggttatgatgtcaaacgatcctaagcgaagatgatttcagttcatcaaatcatcattaatgactttatgtattatttgcacagggagaattgaaactgagtataatcaataagctagatacgaaatcagtttctcaaactgagcttcagaaaggggcattttgtactcttgtttttgcataactggttttgtttttttgcagaattaactataacaatcactggctaccgaagtaaactgatgtactgaattccataatacataacattcaatttttaccacttctgtttagcgaacttgtatacttattttctgttcagattaaaaaaaaaaaaaaaaaaaactcagatatcctataaaaaaaaaaggaattc

SEQ ID NO: 268 - DNA, 231 bp, Homo sapiens
tttttagaaaaagtctacttttatttattggtaaacataagacaaccaagtctgagcatctggtgcagttcccagtgacggcacttgccctgcacacgctcttgaagcaccaggaaaaacacacaacacagtaagaaggcaaagtggctgggagtaaggtatctgcagattcaaactttggaattgaagtagctggtaaacagaaaggcaccgaatcagggtctggagaga

SEQ ID NO: 269 - DNA, 4192 bp, Homo sapiens
gactggcggcgggcgccgcggtcgggctggctgccgggcagcatggaggagctgagcagcgtgggcgagcaggtcttcgccgccgagtgcatcctgagcaagcggctccgcaagggcaagctggagtacctggtcaagtggcgcggctggtcctccaaacataacagctgggagccggaggagaacatcctggacccgaggctgctcctggccttccagaagaaggaacatgagaaggaggtgcagaaccggaagagaggcaagaggccgagaggccggccaaggaagctcactgccatgtcctcctgcagccggcgctccaagctcaaggaacccgatgctccctccaaatccaagtccagcagttcctcctcttcctccacgtcatcctcctcttcctcagatgaagaggatgacagtgacttagatgctaagaggggtccccggggccgcgagacccacccagtgccgcagaagaaggcccagatcctggtggccaaacccgagctgaaggatcccatccggaagaagcggggacgaaagcccctgcccccagagcaaaaggcaacccgaagacccgtgagcctggccaaggtgctgaagaccgcccggaaggatctgggggccccggccagcaagctgccccctccactcagcgcccccgttgcaggcctggcagctctgaaggcccacgccaaggaggcctgtggcggccccagtgccatggccaccccagagaacctggccagcctaatgaagggcatggccagtagccccggccggggtggcatcagctggcagagctccatcgtgcactacatgaaccggatgacccagagccaggcccaggctgccagcaggttggcgctgaaggcccaggccaccaacaagtgcggcctcgggctggacctgaaggtgaggacgcagaaaggggagctgggaatgagccctccaggaagcaaaatcccgaaggcccccagcggtggggctgtggagcagaaagtggggaacacagggggccccccgcacacccatggtgccagcagggtgcctgctgggtgcccaggcccccagccagcacccacccaggagctgagcctccaggtcttggacttgcagagtgtcaagaatggcatgcccggggtgggtctccttgcccgccacgccaccgccaccaagggtgtcccggccaccaacccagcccctgggaagggcactgggagtggcctcattggggccagcggggccaccatgcccaccgacacaagcaaaagtgagaagctggcttccagagcagtggcgccacccacccctgccagcaagagggactgtgtcaagggcagtgctacccccagtgggcaggagagccgcacagcccccggagaagcccgcaaggcggccacactgccagagatgagcgcaggtgaggagagtagcagctcggactccgaccccgactccgcctcgccgcccagcactggacagaacccgtcagtgtccgttcagaccagccaggactggaagcccacccgcagcctcatcgagcacgtatttgtcaccgacgtcactgccaacctcatcaccgtcacagtgaaggagtctcccaccagcgtgggcttcttcaacctgaggcattactgaagccccggcgccaccagctgcgcggtcttactccccttccctgcctatggtgtcgcttggctaagtgactcccagcccaagccccctcaagagtctgggtcgggggaggaggagtgggtggcctccttgatgggcaggcttggaagggacttctcccgcaccccactctgtcccaggacatagggcagggggcctcactgccttgttggtctccaccttgttcctacctctgcaggcctctttgctctcccctcttgcctcaggaaacccggtggcacctgtggctccaggtgactgtcttgaacagagcgggcttcttcatggctgcgttgttgctgagtttgaactgctcctccctggcctgcgtgactgaatcacagctttggtccctgtcttgcaggggctgaggtgtcaggaggggacttctggcccaccttgccttcagccctggagtgggcagagagtattgtggggaggcatggccagtgggactagtgttccctccatctggccacagcttttgggagatggggtgggcaggggtggtcctggctggcattgcctgagccggcagtgatgaagtggggagcttgcccttgacaggtgggggctggctggggccttaatgtgaaaagacagtggcaggcagctggagtagagcgagcccagcagccctaaaaggctgccttcatggccatctagccccagttcagggcagcatccatagcccacaagccagcgtgggtggggcgggggtggtcccacagctgggttccacctgaagagcctccgtgcctcggagcaggagaggcaggctatggctgccaccctccctcctgcctgtgtcccagtgagaactgacctgagtccccttccaaacccagacccacctcctgccccaggcccactgaagcatgttccatttctaaaaagcccagagttcagtgtgtcccaaggaaaacccaaagtggaggtgctcaggtccaggggagtccagtgggcaggacccttggcaggcaagcccctcccttcactcccaggacctaccttctgctagtaaaggactggcttcattctaattatggcccacagactgccccggagacctggaggacagcagtgctggcacttgggtgtccatgggcccgtctgccggctctgcctgtgctgcaagtgttggccgtgggtccagccaacaactccctacgtcctgtgtggggccctgcccaagtggatgaggcattccttgaggagtatcattttccctgacaatccccatcacctttaggggttccctgcttggctcctttccagctgaaaaactagacctgtgccattggggaagctggacaaagtctagggggcccgcctggtagagggtcccgggaagctggatctgtcagcctcggccctgaggcccctgttaactcaagactgtgagctgcctctaggtggtcacgtctgggagctagcttgtatggcttctgaccagtatcaggatttctgttctgagagcagcgtgggcagcaaggcagggcagcccagaggtggcagcggcaggcaatctggtcactaggtctttgtgatgccaaaaataaaagagggtggggtgggtgctttctgttcctctgattggatggagtccgccagcaggcatggggctacattccagtgcctgactatagggaggcactcctgattccatggagcagcccggactttgagaatgggctctggtttgcggggggcaggcgtaccagactgcaagaccccccagtacctcaccgtgccaaataggaagaggtggccttggtgtagccaaatggatctttttaacagtgtgcctttggggagggacccatgtccatggcttcgttgagggccatccatatgccagctgggggccagcccacagtggccatattggctgcagcaggaatggtgcccacctcggcgaattgaagggctaagagtcccagatagctaggccagagctggaagcagacagtaaggggaagagctgctcccacaggagagggagagattccagctcactgcgcagcctgggaggaggcgtggatcctggcacgctgagcctcaggcaccagcctccctgtgctcgacagcaaagtcttgactccttcctgctgagcactgtgctaccttcactgctccaaagccagactaacagctctccaagcccttggggtgactcggcttccaggagctgttggagaaatgaggatgtctgtccctgtctgcctgggcaggccagattcctccccagcagccgggtctctccagaccctgattcggtgcctttctgtttaccagctacttcaatcccaaagtttgaatctgcagataccttactcccagccactttgccttcttactgtgttgtgtgtttttcctggtgcttcaagagcgtgtgcagggcaagtgccgtcactgggaactgcaccagatgctcagacttggttgtcttatgtttaccaataaataaaagtagactttttctatttttatttgctgctaaaaaaaaaaaaaa

SEQ ID NO: 270 - DNA, 478 bp, Homo sapiens
ttaagctcaaggagaaattgaagccatagtcgtgcctgtttgcttagcattcctattgacaactcttctgggagtgctgttctgctttaataagcgagacctaattaaaaaacacatctggcctaatgttccagatccttcaaagagtcatattgcccagtggtcacctcacactcctccaaggcacaattttaattcaaaagatcaaatgtattcagatggcaatttcactgatgtaagtgttgtggaaatagaagcaaatgacaaaaagccttttccagaagatctgaaatcattggacctgttcaaaaaggaaaaaattaatactgaaggacacagcagtggtattggggggtcttcatgcatgtcatcttctaggccaagcatttctagcagtgatgaaaatggatcttcacgacacacttcgagcactgtctagtattctaccgtggtacacagtggctacagacaccaagtc

SEQ ID NO: 271 - DNA, 3242 bp, Homo sapiens
gagcagccaaaaggcccgcggagtcgcgctgggccgccccggcgcagctgaaccgggggccgcgcctgccaggccgacgggtctggcccagcctggcgccaaggggttcgtgcgctgtggagacgcggagggtcgaggcggcgcggcctgagtgaaacccaatggaaaaagcatgacatttagaagtagaagacttagcttcaaatccctactccttcacttactaattttgtgatttggaaatatccgcgcaagatgttgacgttgcagacttggctagtgcaagccttgtttattttcctcaccactgaatctacaggtgaacttctagatccatgtggttatatcagtcctgaatctccagttgtacaacttcattctaatttcactgcagtttgtgtgctaaaggaaaaatgtatggattattttcatgtaaatgctaattacattgtctggaaaacaaaccattttactattcctaaggagcaatatactatcataaacagaacagcatccagtgtcacctttacagatatagcttcattaaatattcagctcacttgcaacattcttacattcggacagcttgaacagaatgtttatggaatcacaataatttcaggcttgcctccagaaaaacctaaaaatttgagttgcattgtgaacgaggggaagaaaatgaggtgtgagtgggatggtggaagggaaacacacttggagacaaacttcactttaaaatctgaatgggcaacacacaagtttgctgattgcaaagcaaaacgtgacacccccacctcatgcactgttgattattctactgtgtattttgtcaacattgaagtctgggtagaagcagagaatgcccttgggaaggttacatcagatcatatcaattttgatcctgtatataaagtgaagcccaatccgccacataatttatcagtgatcaactcagaggaactgtctagtatcttaaaattgacatggaccaacccaagtattaagagtgttataatactaaaatataacattcaatataggaccaaagatgcctcaacttggagccagattcctcctgaagacacagcatccacccgatcttcattcactgtccaagaccttaaaccttttacagaatatgtgtttaggattcgctgtatgaaggaagatggtaagggatactggagtgactggagtgaagaagcaagtgggatcacctatgaagatagaccatctaaagcaccaagtttctggtataaaatagatccatcccatactcaaggctacagaactgtacaactcgtgtggaagacattgcctccttttgaagccaatggaaaaatcttggattatgaagtgactctcacaagatggaaatcacatttacaaaattacacagttaatgccacaaaactgacagtaaatctcacaaatgatcgctatctagcaaccctaacagtaagaaatcttgttggcaaatcagatgcagctgttttaactatccctgcctgtgactttcaagctactcaccctgtaatggatcttaaagcattccccaaagataacatgctttgggtggaatggactactccaagggaatctgtaaagaaatatatacttgagtggtgtgtgttatcagataaagcaccctgtatcacagactggcaacaagaagatggtaccgtgcatcgcacctatttaagagggaacttagcagagagcaaatgctatttgataacagttactccagtatatgctgatggaccaggaagccctgaatccataaaggcataccttaaacaagctccaccttccaaaggacctactgttcggacaaaaaaagtagggaaaaacgaagctgtcttagagtgggaccaacttcctgttgatgttcagaatggatttatcagaaattatactatattttatagaaccatcattggaaatgaaactgctgtgaatgtggattcttcccacacagaatatacattgtcctctttgactagtgacacattgtacatggtacgaatggcagcatacacagatgaaggtgggaaggatggtccagaattcacttttactaccccaaagtttgctcaaggagaaattgaagccatagtcgtgcctgtttgcttagcattcctattgacaactcttctgggagtgctgttctgctttaataagcgagacctaattaaaaaacacatctggcctaatgttccagatccttcaaagagtcatattgcccagtggtcacctcacactcctccaaggcacaattttaattcaaaagatcaaatgtattcagatggcaatttcactgatgtaagtgttgtggaaatagaagcaaatgacaaaaagccttttccagaagatctgaaatcattggacctgttcaaaaaggaaaaaattaatactgaaggacacagcagtggtattggggggtcttcatgcatgtcatcttctaggccaagcatttctagcagtgatgaaaatgaatcttcacaaaacacttcgagcactgtccagtattctaccgtggtacacagtggctacagacaccaagttccgtcagtccaagtcttctcaagatccgagtctacccagcccttgttagattcagaggagcggccagaagatctacaattagtagatcatgtagatggcggtgatggtattttgcccaggcaacagtacttcaaacagaactgcagtcagcatgaatccagtccagatatttcacattttgaaaggtcaaagcaagtttcatcagtcaatgaggaagattttgttagacttaaacagcagatttcagatcatatttcacaatcctgtggatctgggcaaatgaaaatgtttcaggaagtttctgcagcagatgcttttggtccaggtactgagggacaagtagaaagatttgaaacagttggcatggaggctgcgactgatgaaggcatgcctaaaagttacttaccacagactgtacggcaaggcggctacatgcctcagtgaaggactagtagttcctgctacaacttcagcagtacctataaagtaaagctaaaatgattttatctgtgaattcagattttaaaaagtcttcactctctgaagatgatcatttgcccttaaggacaaaaatgaactgaagtttcacatgagctatttccattccagaatatctgggattctactttaagcactacataaactgactttatcctcagaaaaaaaaaaaaaaa

SEQ ID NO: 272 - DNA, 172 bp, Homo sapiens
  modified_base (19)..(19): a, c, t or g
catgcagaccccgcgagcntcccctccccgcccggccctgctgcttctgctgctgctactggggggcgcccacggcctctttcctgaggagccgccgccgcttagcgtggcccccagggactacctgaaccactatcccgtgtttgtgggcagcgggcccggacgcctgacc

SEQ ID NO: 273 - DNA, 486 bp, Homo sapiens
  modified_base (81)..(81): a, c, t or g
  modified_base (89)..(89): a, c, t or g
  modified_base (317)..(317): a, c, t or g
  modified_base (420)..(420): a, c, t or g
  modified_base (449)..(449): a, c, t or g
  modified_base (481)..(481): a, c, t or g
ctgaagtgggtcttgacaaagttgaggatgtcatccggcaaggcgctggaggcattgtactgcatcccgggggctgcgcanacccggcncggggtcgaggcacctgatcctccggcaccggcgtccagatggactcgggggacttctgctctcggaagcggccttcaaacacagctgccacctgtgtcaggtcaaaggcgcagacagccgagccagggatgctgttgctgggcgtggaaaaaacggccaggaccacgggccggcccccgaggcttgaccacgcccgtgacagcctgcagcacgttgaagtagaaatnggagttttccgggtacagagcagtttgagccgcgcctttcaggaaggacgttccactgctttttcagcacgcgggggggagcctttccacgttcgtttttttncaaaattggggccaagcggggaacaacancaacttttttcaggtagttaaatttcattcgnaattt

SEQ ID NO: 274 - DNA, 3805 bp, Homo sapiens
tccgaggcgtcacctcctcctgtcgcctggccctcgccatgcagaccccgcgagcgtcccctccccgcccggccctgctgcttctgctgctgctactggggggcgcccacggcctctttcctgaggagccgccgccgcttagcgtggcccccagggactacctgaaccactatcccgtgtttgtgggcagcgggcccggacgcctgacccccgcagaaggtgctgacgacctcaacatccagcgagtcctgcgggtcaacaggacgctgttcattggggacagggacaacctctaccgcgtagagctggagccccccacgtccacggagctgcggtaccagaggaagctgacctggagatctaaccccagcgacataaacgtgtgtcggatgaagggcaaacaggagggcgagtgtcgaaacttcgtaaaggtgctgctccttcgggacgagtccacgctctttgtgtgcggttccaacgccttcaacccggtgtgcgccaactacagcatagacaccctgcagcccgtcggagacaacatcagcggtatggcccgctgcccgtacgaccccaagcacgccaatgttgccctcttctctgacgggatgctcttcacagctactgttaccgacttcctagccattgatgctgtcatctaccgcagcctcggggacaggcccaccctgcgcaccgtgaaacatgactccaagtggttcaaagagccttactttgtccatgcggtggagtggggcagccatgtctacttcttcttccgggagattgcgatggagtttaactacctggagaaggtggtggtgtcccgcgtggcccgagtgtgcaagaacgacgtgggaggctccccccgcgtgctggagaagcagtggacgtccttcctgaaggcgcggctcaactgctctgtacccggagactcccatttctacttcaacgtgctgcaggctgtcacgggcgtggtcagcctcgggggccggcccgtggtcctggccgttttttccacgcccagcaacagcatccctggctcggctgtctgcgcctttgacctgacacaggtggcagctgtgtttgaaggccgcttccgagagcagaagtcccccgagtccatctggacgccggtgccggaggatcaggtgcctcgaccccggcccgggtgctgcgcagcccccgggatgcagtacaatgcctccagcgccttgccggatgacatcctcaactttgtcaagacccaccctctgatggacgaggcggtgccctcgctgggccatgcgccctggatcctgcggaccctgatgaggcaccagctgactcgagtggctgtggacgtgggagccggcccctggggcaaccagaccgttgtcttcctgggttctgaggcggggacggtcctcaagttcctcgtccggcccaatgccagcacctcagggacgtctgggctcagtgtcttcctggaggagtttgagacctaccggccggacaggtgtggacggcccggcggtggcgagacagggcagcggctgctgagcttggagctggacgcagcttcggggggcctgctggctgccttcccccgctgcgtggtccgagtgcctgtggctcgctgccagcagtactcggggtgtatgaagaactgtatcggcagtcaggacccctactgcgggtgggcccccgacggctcctgcatcttcctcagcccgggcaccagagccgcctttgagcaggacgtgtccggggccagcacctcaggcttaggggactgcacaggactcctgcgggccagcctctccgaggaccgcgcggggctggtgtcggtgaacctgctggtaacgtcgtcggtggcggccttcgtggtgggagccgtggtgtccggcttcagcgtgggctggttcgtgggcctccgtgagcggcgggagctggcccggcgcaaggacaaggaggccatcctggcgcacggggcgggcgaggcggtgctgagcgtcagccgcctgggcgagcgcagggcgcagggtcccgggggccggggcggaggcggtggcggtggcgccggggttcccccggaggccctgctggcgcccctgatgcagaacggctgggccaaggccacgctgctgcagggcgggccccacgacctggactcggggctgctgcccacgcccgagcagacgccgctgccgcagaagcgcctgcccactccgcacccgcacccccacgccctgggcccccgcgcctgggaccacggccaccccctgctcccggcctccgcttcatcctccctcctgctgctggcgcccgcccgggcccccgagcagccccccgcgcctggggagccgacccccgacggccgcctctatgctgcccggcccggccgcgcctcccacggcgacttcccgctcaccccccacgccagcccggaccgccggcgggtggtgtccgcgcccacgggccccttggacccagcctcagccgccgatggcctcccgcggccctggagcccgcccccgacgggcagcctgaggaggccactgggcccccacgcccctccggccgccaccctgcgccgcacccacacgttcaacagcggcgaggcccggcctggggaccgccaccgcggctgccacgcccggccgggcacagacttggcccacctcctcccctatgggggggcggacaggactgcgccccccgtgccctaggccgggggccccccgatgccttggcagtgccagccacgggaaccaggagcgagagacggtgccagaacgccggggcccggggcaactccgagtgggtgctcaagtcccccccgcgacccacccgcggagtggggggccccctccgccacaaggaagcacaaccagctcgccctccccctacccggggccgcaggacgctgagacggtttgggggtgggtgggcgggaggactttgctatggatttgaggttgaccttatgcgcgtaggttttggttttttttgcagttttggtttcttttgcggttttctaaccaattgcacaactccgttctcggggtggcggcaggcaggggaggcttggacgccggtggggaatggggggccacagctgcagacctaagccctcccccacccctggaaaggtccctccccaacccaggcccctggcgtgtgtgggtgtgcgtgcgtgtgcgtgccgtgttcgtgtgcaaggggccggggaggtgggcgtgtgtgtgcgtgccagcgaaggctgctgtgggcgtgtgtgtcaagtgggccacgcgtgcagggtgtgtgtccacgagcgacgatcgtggtggccccagcggcctgggcgttggctgagccgacgctggggcttccagaaggcccgggggtctccgaggtgccggttaggagtttgaaccccccccactctgcagagggaagcggggacaatgccggggtttcaggcaggagacacgaggagggcctgcccggaagtcacatcggcagcagctgtctaaagggcttgggggcctggggggcggcgaaggtgggtggggcccctctgtaaatacggccccagggtggtgagagagtcccatgccacccgtccccttgtgacctcccccctctgacctccagctgaccatgcatgccacgtggctggctgggtcctctgccctctctggagtttgcctcccccagccccctccccatcaataaaactctgtttacaaccaccggcaaaaaaaaaaaaaaaaaaaaaaaaaaaaaaaaaaaaaaaaaaaaaaaaaaaaaaaaaaaaaaaaaaaaaaaaaaaaaaaaaaaaaaa

SEQ ID NO: 275 - DNA, 398 bp, Homo sapiens
  modified_base (51)..(51): a, c, t or g
  modified_base (320)..(320): a, c, t or g
  modified_base (374)..(374): a, c, t or g
ccagggatctgagcagctccttctagcatccttcatccttcaggtaccagncatccagacagtgcttgagctgcagaaactgagaccagacctctggcctggccctccccaggggcctcctttcctatagtcactgcttctgcatcagatactttcagctgcaactccctactgggtggggcaccatttcaggcagaaggttttggtaccctccactgaccctacacccagggctgctactgccgcttgtggcttcaggatgaaaggtgagaccccggtgaacagcactatgagtattgggcaagcacgcaagattggtngaacagctttaagattgaaggccagcttgtgttcggataaaggtgttccaaggnagcagcagacctgatgatttattg

SEQ ID NO: 276 - DNA, 912 bp, Homo sapiens
ccagggatctgagcagctccttctagcatccttcatccttcaggtaccagccatccagacagtgcttgagctgcagaaactgagaccagacctctggcctggccctccccaggggcctcctttcctatagtcactgcttctgcatcagatactttcagctgcaactccctactgggtggggcacccatttcaggcagaaggttttggtaccctccactgaccctacacccagggctgctactgccgcttgtggcttcaggatgaaaggtgagaccccggtgaacagcactatgagtattgggcaagcacgcaagatggtggaacagcttaagattgaagccagcttgtgtcggataaaggtgtccaaggcagcagcagacctgatgacttactgtgatgcccacgcctgtgaggatcccctcatcacccctgtgcccacttcggagaaccccttccgggagaagaagttcttctgtgctctcctctgagctcccctgtcccttctcacaactcctcccttttccctctcctgggcccttccttaggtcagtaattgttgtgagccccttaggctccttgcatcccatccctaacccttgcctgaccatgtgaggttatctgaagcacaaggcccaccctcacctatctgtcgaccccatttcctaccacctttgtggccgaccccaagcaccccagagatatgaggcaccctttgctccacccacagcagggccccgtcagactctgccagcgcgtcctgcccgcttccctcggtgacctgctcagacaatggagagggatgggccaggttcttgctctcagtctcacctggagctactgggagggtaaagccatttgaagaataaagtcatccagagccccaaaaaaaaaaaaaaaaaaaaaaaaaaaaaa

SEQ ID NO: 277 - DNA, 447 bp, Homo sapiens
  modified_base (4)..(4): a, c, t or g
  modified_base (6)..(6): a, c, t or g
  modified_base (8)..(8): a, c, t or g
  modified_base (10)..(10): a, c, t or g
  modified_base (48)..(48): a, c, t or g
  modified_base (300)..(300): a, c, t or g
  modified_base (331)..(331): a, c, t or g
  modified_base (374)..(374): a, c, t or g
  modified_base (389)..(389): a, c, t or g
  modified_base (394)..(394): a, c, t or g
  modified_base (402)..(402): a, c, t or g
  modified_base (420)..(420): a, c, t or g
aatntntncnaatattttatttattgtggagtattttacatgcaagancccaattagagagagggtatctggaaggagggccagtggggtggatggatgctctgagcctcgggtgcactgacccaccctccagaaccagctctgcccacagaaacacatgacagtgacaaaaacactaaacttctaggacgagtggacagcaaacgcgacattcaacacattcctcttttcagtagcccccaacaatcctgagaatcctcacaattaagtgcaaactttagggaaataaatatccgtccncctctccggggagagcctgggaggtatgggncagacaggaagcagttctgactcggggggctgatgggctgctncctatgggctggggnggccncagggggnaaggccctgactttgggncccccacaggatagggggagggggctt

SEQ ID NO: 278 - DNA, 1903 bp, Homo sapiens
aagtgtcagtcaggacgggagtccggcgggctacagcggaggcctaggtggcagacatgggggcccgggccgctgcgtgttgtccacccaagatggagttcctcctggggaacccgttcagcacagcagtggggcagtgcctcgaaaaggcaacagatggctccctgcaaagtgaggattggacgttgaatatggagatctgtgacatcatcaatgagacggaggaagggccaaaggatgccattcgagccctgaagaagcggctcaacgggaaccggaactacagagaggtgatgctggcattaacagtgctggagacatgtgtgaagaactgtggccaccgcttccacatccttgtggccaaccgagatttcatcgacagtgttctggtcaagaattatatctcccaagaacaaccctcccaccattgtacaggacaaagtgcttgctctgtatccagagtgtcccgtgaagtggatccagctgcgagcatgcccaggtcccaatcacagcagaggacaagtgctggttcctattcctcgccgcctcctgctccctactccgcaccgcaggccccrgctctgagtgtgackggccccatcacagccaattcagaacagattgccaggctgcggagtgaactggacgtcgttcgaggaaacacaaaagtcatgtctgagatgttaacagaaatggtccctggacaggaggattcatctgatctggagttgctgcaggagctcaacaggacctgtcgggccatgcagcagcgcatcgtggagctcatctcccgagtgtccaatgaggaggtcaccgaggagctgctgcacgtcaacgatgacctcaacaatgtcttcctccgctatgagaggttcgagaggtacaggtccggccgatccgttcagaatgccagcaatggagtactaagcgaagttactgaagacaacttactagacctgggccccggatcccccgctgtggttagccccatggtggggagcacagcacccccatcttccctctcctcccagcttgcaggcttagacttggggacagagagcgtcagtggcaccctcagttcactccagcaatgtaatccccgtgacggctttgacatgtttgcccagacgagaggaaactccttggctgagcagcgccagacggtaacctatgaggatcctcaggctgtcggaggacttgcttctgcactagacaatcgaaaacagagttcagaagggatccccgttgcgcagccatctgtcatggacgacattgaggtgtggctcaggaccgacctgaagggtgatgatctggaggagggtgtcacaagtgaagagtttgataaattcctggaagtaagagccaaagctgctgaaatggttcacgacctcccctcgccccccatggaggctcctgccccagcctcaaacccttctggccggaagaagccagagcggtcagaggatgccctcttcgccctgtgagcagctctgtggtttgcctccccagatggcgggtccccgctcgcaccccgtggacaccgggcactggccactcctacatccccagctccacacggcctgcacacctgtgtttccatggaaatgccaccgtgtctgctcccaggcctcccactagtcaggaccagcttcagccacttcttttctctgagtggtgggacaactgcagccagagactctctcccctcccaccatgggcccctctgcccatgtttcctcccaggaagagcgggcagagtggcccagccccccctgggcagggagagggccaaggacaattgggagggcagcaggcagcccgcagatggtggccatgtggcacgctgctgagacgacactaccaataaaccaaactgccacgcacacactgcaggctcacaccc

SEQ ID NO: 279 - DNA, 459 bp, Homo sapiens
  modified_base (332)..(332): a, c, t or g
  modified_base (404)..(404): a, c, t or g
  modified_base (434)..(434): a, c, t or g
  modified_base (452)..(452): a, c, t or g
ggctcggccgtgaacatcccgtctgatgagggccacatccccctgcacctggcggcccagcatggtcactatgatgtgtctgagatgctgctacagcaccagtctaacccgtgcatggtggacaactcggggaagacgcccctgggacctggcctgcgagttcggccgcgttggggtggtccagctgctcctcagcagcaatatgtgtgcggcgctgctgggagccccggccgggagacgccaccgaccccaacggcaccagccctttgcacctcgcagctaaaaacggccacatcgacatcatcaggtaggagccggtagcagggagggcntcagcctttaggggttccccaggggtttcagcagcagcctgggggttcaggggcaccagttttttggttttnggggataaggggcgggacaagggcagggtnccaggttccttggttcanggttttg

SEQ ID NO: 280 - DNA, 5695 bp, Homo sapiens
cgcagccgcgtcgctgcggccccggccgcgcaatggggaaggagcaggagctggtgcaggcggtgaaggcggaggacgtagggaccgcgcagaggctgctgcagaggccgcggcccgggaaggccaagctcctgggttccaccaagaagatcaatgtcaacttccaggacccggatgggttctcggctctgcaccatgcggccctgaacggcaacacggaattgatcagcctgctgctggaggcccaggccgctgtggacatcaaggacaacaaaggcatgcggccgctgcactatgcggcctggcagggccggaaggagcccatgaagctggtgctgaaggcgggctcggccgtgaacatcccgtctgatgagggccacatccccctgcacctggcggcccagcatggtcactatgatgtgtctgagatgctgctacagcaccagtctaacccgtgcatggtggacaactcggggaagacgcccctggacctggcctgcgagttcggccgcgttggggtggtccagctgctcctcagcagcaatatgtgtgcggcgctgctggagccccggccgggagacgccaccgaccccaacggcaccagccctttgcacctcgcagctaaaaacggccacatcgacatcatcaggctcctcctccaagccggcatcgacattaaccgccagaccaagtccggcacggccctgcacgaggctgcgctctgcggaaagacagaggtggtgcggctgctgctggatagcgggatcaatgcccacgtgaggaacacctacagccagacagccctggacatcgtgcaccagttcaccacgtcccaggccagcagggagatcaagcagctgttgcgagaggcctcagcggccctgcaggtccgggcgaccaaggattattgcaacaattacgacctgaccagcctcaacgtgaaggcaggggacatcatcacagtcctcgagcagcatccggatggccggtggaagggctgcatccatgacaaccggacgggcaatgaccgggtgggctacttcccgtcctccctgggcgaggccattgtcaagcgagcaggttcccgagcaggcactgaaccaagcctgccccagggaagcagctcatcgggaccctctgcacccccagaggagatctgggtgctgaggaagccttttgcaggtggggaccgaagcggcagcattagcggcatggctggcggccggggcagcgggggtcacgccctacacgcgggctctgaaggcgtcaagctcctggcaacggtgctttcccagaagtccgtctctgagtccggcccgggggacagccccgccaagcctccggaaggctctgcaggtgtggcccggtcccagcctccagtggcccacgccgggcaggtctatggggagcagccgcccaagaagctggagccagcatcggagggcaagagctctgaggccgtgagccagtggctcaccgcgttccagctgcagctctacgcccccaacttcatcagcgccggctacgacctgcccaccatcagccgcatgactcccgaggacctcacggccattggtgtcaccaagccgggccaccggaagaagatcgcggcagagatcagcggcctaagcatccctgactggctgcctgagcacaaacccgctaacctggccgtgtggctgtccatgatcggcctggcccagtactacaaggtgttggtggacaatggctacgagaacattgatttcatcaccgacatcacctgggaggacctgcaggagatcggcatcaccaagctggggcaccagaagaagctgatgctcgctgtgaggaagctggcagagctgcagaaggctgaatacgccaagtatgaggggggccccctgcgccggaaggcgccccagtctcttgaagtgatggccatcgagtcgccgcccccgcctgagcccacaccggccgactgccagtcccctaaaatgaccaccttccaggacagcgagctcagtgacgagctgcaggctgccatgactggcccggctgaggtggggcccaccactgagaagccctccagccacctgccacccaccccgagggccaccacgcggcaggactccagcctgggtggtcgggcacggcacatgagcagctcgcaggagctgctgggagatgggccccctgggcccagcagccccatgtctcgaagccaggagtacctcctggatgagggccccgcccccggcaccccgcccagggaggcccggcccggccgccacggccacagcatcaagagggccagcgtgccccccgtgcctggcaagccacggcaggtcctcccaccaggcactagccacttcacgcccccccagacgcccaccaaaacccgaccaggctctccccaggcccttgggggacctcatggtccagccccagctacggccaaggtgaagcccaccccgcagctgctgccgccgacagagcgccccatgtcaccccgctccctgcctcagtcaccgacgcaccgcggctttgcctacgtgctgccccagcccgtggagggcgaggtggggccggctgccccggggcctgcgcccccacccgtgccgacggctgtgcccacactgtgcctgccccctgaggccgacgcggagccggggcggcccaagaagcgggcccacagcctgaatcgctatgcggcgtccgacagcgagccggagcgggacgagctgctggtgcctgcggctgccggcccctatgccacggtccagcggcgcgtgggccgcagccactcagtgagggcgcccgcaggtgccgacaagaacgtcaaccgcagccagtcctttgccgtgcggccccgaaagaaggggcccccgccgcccccacccaagcgctccagctcggccctggctagtgccaacctggcggatgagccggtgcctgacgccgagcctgaggatggcctgctgggggtccgggcacagtgccggcgggccagtgacctggccggcagcgtggacacgggtagtgccggcagtgtgaagagcatcgcggccatgctggagctgtcctccattgggggtgggggccgggctgcccgcaggcctcctgagggccaccccactccccgccctgccagcccagagccgggccgggtggccaccgtgctggcctcagtgaaacacaaagaggccatcgggcctggcggggaggtggtgaaccggcgccgcacgctcagcgggccagtcaccggacttctggccactgcccgccgggggcctggggagtcggcagacccaggcccctttgtggaggatggcactggccggcagcggcctcggggtccctccaagggcgaggcgggtgtcgaaggcccgcccttggccaaggtggaagccagcgccacactcaagaggcgcatccgggccaagcagaaccagcaggagaacgtcaagttcatcctgaccgagtctgacacggtcaagcgcaggcccaaggccaaggagcgggaggccgggcctgagccaccaccgccactgtccgtgtaccataatggcactggcaccgtgcgccgccgaccggcctcggagcaggctgggcctccggagctgcctccaccgcccccgcctgccgaacccccgcccaccgacctggcgcacctacccccattgcccccgcccgagggcgaagcccggaagccggccaagccgcctgtctctcccaagcccgtcctgacgcagcctgtgcccaagctccagggctcgcccacacccacctccaagaaggtgccgctgccaggccctggcagcccagaggtgaagcgcgcccacggcacgccaccgcccgtgtctcccaagccgccgccgccgcccacagcgcccaagcccgtcaaggcggtcgcggggctgccttcgggcagcgccggcccttcacccgcaccctcgcccgcgcgacagccgcccgccgccctcgccaagccgcccggtacgccgccctcgctgggcgccagccccgccaagcccccgtcccccggcgcgcccgcgctgcacgtgcccgccaagcccccgcgagccgccgccgccgccgccgccgccgccgccgcgccccccgccccgcccgaaggcgcctcgccaggggacagcgcccggcagaaactggaggagacaagcgcgtgcctggccgcggcgctgcaggcggtggaggagaagatccggcaggaggacgcgcagggcccgcgcgactcggcggcggaaaagagcactggcagcatcctggacgacatcggcagcatgttcgacgacctggccgaccagctggatgccatgctggagtgaacgccgcctggccgggccctcccgcgccgcccgggccctccccgcacactgacctatacctcaggatgggcgcgtctgggcgcggcgcgagcggccgggcagggccctgcagaagcacaactccggcccctggacccgggccggggcgcccaccggggaccgcctggccgggggctccaagggctctaggcagaccctgcgcccgcgggtcctccccacctgctgctccccgtgcaatacctgctgggcctcctgcccgcgcgggaggggagggcgccccgggaccagggatggggcagcgcacaggcccgggcccagcacagaactgcccatcgggacgcccggccagccgctcgggcgcagcacaagggacaggggaccaaggtcagggcccccctgccccaccgcacccccagaatataagctatcaagagtattaatttattgggaatgagctgaggcggatttccccagagaaacaaaaaggtataactttaacaaatatatatttaaagaaagaaatattattgattctatagaaaaccatttaccaactgaaaggacacgaagtctagctccggacaaaagctgttagaggcccaggctgtctgcctgcggtccttcctccggccagagtggaggccccaggctgctagcacaggtggaaggctggggcccgggggcgggtgctctgccgggggctcctccgtgcttctctcctaagttctctgcgccccaagaactcgaggttgtgccttgctctcggcggccgtgtcctcctcctggcgtggctgcgtcccagggcgcgggtgggtttggtgaatgtgggtgtgtcagcgtggcagccacgtggaagcagggcatgtagcaggccaggccacgggcttgcagctcctctgagggtgtgcctggccccctctccaggggctgtgcaggcagcccatccaccccagtggagttcccacggacgcttctgctcatggtccaaggctgtgttgtgtggtcattctcgccctcccttttcctctctcctcctgccccctccaagaagtactgactggtctcctctatcgtgtttgctgatccacagtgttgggcacaactttgacgtttcttaaaaaaaaaatttaaaaaatgccgaaaaccagcgattgtggtgtggggcgggtggaggcggctggcggaggtggcgtcccggcgtgcagggccccttcctgctgtctcaccccgtgtttccctgcgagtggacgtgcccagctgtccccccaggcctctcctcagagggcggcacaggctgggctccagcaggtgggcaggggaggtctgggcaaggcgctgccgtcggctgtcaataaacagcaggaaac

SEQ ID NO: 281 - DNA, 412 bp, Homo sapiens
  modified_base (200)..(200): a, c, t or g
  modified_base (244)..(244): a, c, t or g
  modified_base (342)..(342): a, c, t or g
  modified_base (361)..(361): a, c, t or g
  modified_base (371)..(371): a, c, t or g
  modified_base (406)..(406): a, c, t or g
agccagggtggtctcgatctcctgaccttgtgatccgcccacctcggcctcccaaagtgcttggattacaggcatgagtcactgcgcccagcctgcaaagttttctttcttaaacaattttgaaactgttactggaagatatcaatatgtggccaggtcttgggtacaggctaattcattatattatcctctataatttnccatatgttttaaatcatttattaagatacgtgcacaccttggngaaagagagtaaggcccttcatgacgggacccacattgaacatgccactcattttcaataaaggtaaaagggcgggcgtgggtgaggagctggcacanattccactttcctggctgnaagtctcctnttcaggaacaggtcctggaccccgggaaaccattnaccctt

SEQ ID NO: 282 - DNA, 176 bp, Homo sapiens
aaccagcaccatgcccatgacactggggtactggaacatccgcgggctggcccattccatccgcctgctcctggaatacacagactcaagctacgaggaaaagaagtacacgatgggggacgctcctgattatgacagaagccagtggctgaatgaaaaattcaagctgggcctgg

SEQ ID NO: 283 - DNA, 446 bp, Homo sapiens
  modified_base (1)..(1): a, c, t or g
  modified_base (4)..(4): a, c, t or g
  modified_base (6)..(6): a, c, t or g
  modified_base (9)..(10): a, c, t or g
  modified_base (123)..(123): a, c, t or g
  modified_base (168)..(168): a, c, t or g
  modified_base (213)..(213): a, c, t or g
  modified_base (231)..(231): a, c, t or g
  modified_base (245)..(245): a, c, t or g
  modified_base (329)..(329): a, c, t or g
  modified_base (387)..(387): a, c, t or g
  modified_base (392)..(392): a, c, t or g
  modified_base (410)..(410): a, c, t or g
  modified_base (421)..(421): a, c, t or g
  modified_base (426)..(426): a, c, t or g
nganantgnntttatttcttggtgcctccaagagctcatggaaaagcagcacagtgagcaacaagcaacagtgggtcagtaaatgtatatgactcaacacattgccacagtctcagcttggcngtgtggtacatgctgccaagggtcgggtgccaagagagagcagantgaagccagggtccccaaggaagtgagggcccaaaatagggagtntgggtgatgagggtgganttcaaatccagatntcagagctacaatcgcccccagggtagcgggctcaatggggcaagggctgggccaaggggctccttcccgaagtccaccagggnagttggggttcaacttcagccctccttttactgtgtctacatcaacctgcagcatcanagagncttccctgatgagttcanggtaaaactgnttttncccagggattttacagcgac

SEQ ID NO: 284 - DNA, 1721 bp, Homo sapiens
caccagcacagcaaacccgccgggatcaaagtgtaccagtcggcagcatggctacgaaatgtgggaattgtggacccggctactccacccctctggaggccatgaaaggacccagggaagagatcgtctacctgccctgcatttaccgaaacacaggcactgaggccccagattatctggccactgtggatgttgaccccaagtctccccagtattgccaggtcatccaccggctgcccatgcccaacctgaaggacgagctgcatcactcaggatggaacacctgcagcagctgcttcggtgatagcaccaagtcgcgcaccaagctggtgctgcccagtctcatctcctctcgcatctatgtggtggacgtgggctctgagccccgggccccaaagctgcacaaggtcattgagcccaaggacatccatgccaagtgcgaactggcctttctccacaccagccactgcctggccagcggggaagtgatgatcagctccctgggagacgtcaagggcaatggcaaagggggttttgtgctgctggatggggagacgttcgaggtgaaggggacatgggagagacctgggggtgctgcaccgttgggctatgacttctggtaccagcctcgacacaatgtcatgatcagcactgagtgggcagctcccaatgtcttacgagatggcttcaaccccgctgatgtggaggctggactgtacgggagccacttatatgtatgggactggcagcgccatgagattgtgcagaccctgtctctaaaagatgggcttattcccttggagatccgcttcctgcacaacccagacgctgcccaaggctttgtgggctgcgcactcagctccaccatccagcgcttctacaagaacgagggaggtacatggtcagtggagaaggtgatccaggtgccccccaagaaagtgaagggctggctgctgcccgaaatgccaggcctgatcaccgacatcctgctctccctggacgaccgcttcctctacttcagcaactggctgcatggggacctgaggcagtatgacatctctgacccacagagaccccgcctcacaggacagctcttcctcggaggcagcattgttaagggaggccctgtgcaagtgctggaggacgaggaactaaagtcccagccagagcccctagtggtcaagggaaaacgggtggctggaggccctcagatgatccagctcagcctggatgggaagcgcctctacatcaccacgtcgctgtacagtgcctgggacaagcagttttaccctgatctcatcagggaaggctctgtgatgctgcaggttgatgtagacacagtaaaaggagggctgaagttgaaccccaacttcctggtggacttcgggaaggagccccttggcccagcccttgcccatgagctccgctaccctgggggcgattgtagctctgacatctggatttgaactccaccctcatcacccacactccctattttgggccctcacttccttggggacctggcttcattctgctctctcttggcacccgacccttggcagcatgtaccacacagccaagctgagactgtggcaatgtgttgagtcatatacatttactgaccactgttgcttgttgctcactgtgctgcttttccatgagctcttggaggcaccaagaaataaactcgtaaccctgtccttcaaaaaaaaaaaaaaaaa

SEQ ID NO: 285 - DNA, 448 bp, Homo sapiens
gaccatttcatcacatactttattggacatctcctgtggctggtcactgggatacagtaaccaggaaatacagtcggccctcatgaatgaacaaaacttacaaccccaggaggggagccagaaactcaattagtggcttagtttccacaacactacgtgctacaaagaggtacagaacaattccaggcaaactaagaacctgccccagcctggaggacaggcatgggggtgagggaacccacaggcaagaagcctcccttaagctgagctcaggactggatgaaatgatcttggtggggcaggagggaaagttccaggcagggaaaacagcagggagtggtgtgtggtttgaggtgcctgcctaagggaggcaggagatggtaggtacagagttagtgtaagaaagcccaagagaggctgggggaccagatcgcacaggccctgggag

SEQ ID NO: 286 - DNA, 12515 bp, Homo sapiens
ctaccgggcggaggtgagcgcggcgccggctcctcctgcggcggactttgggtgcgacttgacgagcggtggttcgacaagtggccttgcgggccggatcgtcccagtggaagagttgtaaatttgcttctggccttcccctacggattatacctggccttcccctacggattatactcaacttactgtttagaaaatgtggcccacgagacgcctggttactatcaaaaggagcggggtcgacggtccccactttcccctgagcctcagcacctgcttgtttggaaggggtattgaatgtgacatccgtatccagcttcctgttgtgtcaaaacaacattgcaaaattgaaatccatgagcaggaggcaatattacataatttcagttccacaaatccaacacaagtaaatgggtctgttattgatgagcctgtacggctaaaacatggagatgtaataactattattgatcgttccttcaggtatgaaaatgaaagtcttcagaatggaaggaagtcaactgaatttccaagaaaaatacgtgaacaggagccagcacgtcgtgtctcaagatctagcttctcttctgaccctgatgagaaagctcaagattccaaggcctattcaaaaatcactgaaggaaaagtttcaggaaatcctcaggtacatatcaagaatgtcaaagaagacagtaccgcagatgactcaaaagacagtgttgctcagggaacaactaatgttcattcctcagaacatgctggacgtaatggcagaaatgcagctgatcccatttctggggattttaaagaaatttccagcgttaaattagtgagccgttatggagaattgaagtctgttcccactacacaatgtcttgacaatagcaaaaaaaatgaatctcccttttggaagctttatgagtcagtgaagaaagagttggatgtaaaatcacaaaaagaaaatgtcctacagtattgtagaaaatctggattacaaactgattacgcaacagagaaagaaagtgctgatggtttacagggggagacccaactgttggtctcgcgtaagtcaagaccaaaatctggtgggagcggccacgctgtggcagagcctgcttcacctgaacaagagcttgaccagaacaaggggaagggaagagacgtggagtctgttcagactcccagcaaggctgtgggcgccagctttcctctctatgagccggctaaaatgaagacccctgtacaatattcacagcaacaaaattctccacaaaaacataagaacaaagacctgtatactactggtagaagagaatctgtgaatctgggtaaaagtgaaggcttcaaggctggtgataaaactcttactcccaggaagctttcaactagaaatcgaacaccagctaaagttgaagatgcagctgactctgccactaagccagaaaatctctcttccaaaaccagaggaagtattcctacagatgtggaagttctgcctacggaaactgaaattcacaatgagccatttttaactctgtggctcactcaagttgagaggaagatccaaaaggattccctcagcaagcctgagaaattgggcactacagctggacagatgtgctctgggttacctggtcttagttcagttgatatcaacaactttggtgattccattaatgagagtgagggaatacctttgaaaagaaggcgtgtgtcctttggtgggcacctaagacctgaactatttgatgaaaacttgcctcctaatacgcctctcaaaaggggagaagccccaaccaaaagaaagtctctggtaatgcacactccacctgtcctgaagaaaatcatcaaggaacagcctcaaccatcaggaaaacaagagtcaggttcagaaatccatgtggaagtgaaggcacaaagcttggttataagccctccagctcctagtcctaggaaaactccagttgccagtgatcaacgccgtaggtcctgcaaaacagcccctgcttccagcagcaaatctcagacagaggttcctaagagaggaggagaaagagtggcaacctgccttcaaaagagagtgtctatcagccgaagtcaacatgatattttacagatgatatgttccaaaagaagaagtggtgcttcggaagcaaatctgattgttgcaaaatcatgggcagatgtagtaaaacttggtgcaaaacaaacacaaactaaagtcataaaacatggtcctcaaaggtcaatgaacaaaaggcaaagaagacctgctactccaaagaagcctgtgggcgaagttcacagtcaatttagtacaggccacgcaaactctccttgtaccataataatagggaaagctcatactgaaaaagtacatgtgcctgctcgaccctacagagtgctcaacaacttcatttccaaccaaaaaatggactttaaggaagatctttcaggaatagctgaaatgttcaagaccccagtgaaggagcaaccgcagttgacaagcacatgtcacatcgctatttcaaattcagagaatttgcttggaaaacagtttcaaggaactgattcaggagaagaacctctgctccccacctcagagagttttggaggaaatgtgttcttcagtgcacagaatgcagcaaaacagccatctgataaatgctctgcaagccctcccttaagacggcagtgtattagagaaaatggaaacgtagcaaaaacgcccaggaacacctacaaaatgacttctctggagacaaaaacttcagatactgagacagagccttcaaaaacagtatccactgtaaacaggtcaggaaggtctacagagttcaggaatatacagaagctacctgtggaaagtaagagtgaagaaacaaatacagaaattgttgagtgcatcctaaaaagaggtcagaaggcaacactactacaacaaaggagagaaggagagatgaaggaaatagaaagaccttttgagacatataaggaaaatattgaattaaaagaaaacgatgaaaagatgaaagcaatgaagagatcaagaacttgggggcagaaatgtgcaccaatgtctgacctgacagacctcaagagcttgcctgatacagaactcatgaaagacacggcacgtggccagaatctcctccaaacccaagatcatgccaaggcaccaaagagtgagaaaggcaaaatcactaaaatgccctgccagtcattacaaccagaaccaataaacaccccaacacacacaaaacaacagttgaaggcatccctggggaaagtaggtgtgaaagaagagctcctagcagtcggcaagttcacacggacgtcaggggagaccacgcacacgcacagagagccagcaggagatggcaagagcatcagaacgtttaaggagtctccaaagcagatcctggacccagcagcccgtgtaactggaatgaagaagtggccaagaacgcctaaggaagaggcccagtcactagaagacctggctggcttcaaagagctcttccagacaccaggtccctctgaggaatcaatgactgatgagaaaactaccaaaatagcctgcaaatctccaccaccagaatcagtggacactccaacaagcacaaagcaatggcctaagagaagtctcaggaaagcagatgtagaggaagaattcttagcactcaggaaactaacaccatcagcagggaaagccatgcttacgcccaaaccagcaggaggtgatgagaaagacattaaagcatttatgggaactccagtgcagaaactggacctggcaggaactttacctggcagcaaaagacagctacagactcctaaggaaaaggcccaggctctagaagacctggctggctttaaagagctcttccagactcctggtcacaccgaggaattagtggctgctggtaaaaccactaaaataccctgcgactctccacagtcagacccagtggacaccccaacaagcacaaagcaacgacccaagagaagtatcaggaaagcagatgtagagggagaactcttagcgtgcaggaatctaatgccatcagcaggcaaagccatgcacacgcctaaaccatcagtaggtgaagagaaagacatcatcatatttgtgggaactccagtgcagaaactggacctgacagagaacttaaccggcagcaagagacggccacaaactcctaaggaagaggcccaggctctggaagacctgactggctttaaagagctcttccagacccctggtcatactgaagaagcagtggctgctggcaaaactactaaaatgccctgcgaatcttctccaccagaatcagcagacaccccaacaagcacaagaaggcagcccaagacacctttggagaaaagggacgtacagaaggagctctcagccctgaagaagctcacacagacatcaggggaaaccacacacacagataaagtaccaggaggtgaggataaaagcatcaacgcgtttagggaaactgcaaaacagaaactggacccagcagcaagtgtaactggtagcaagaggcacccaaaaactaaggaaaaggcccaacccctagaagacctggctggctggaaagagctcttccagacaccagtatgcactgacaagcccacgactcacgagaaaactaccaaaatagcctgcagatcacaaccagacccagtggacacaccaacaagctccaagccacagtccaagagaagtctcaggaaagtggacgtagaagaagaattcttcgcactcaggaaacgaacaccatcagcaggcaaagccatgcacacacccaaaccagcagtaagtggtgagaaaaacatctacgcatttatgggaactccagtgcagaaactggacctgacagagaacttaactggcagcaagagacggctacaaactcctaaggaaaaggcccaggctctagaagacctggctggctttaaagagctcttccagacacgaggtcacactgaggaatcaatgactaacgataaaactgccaaagtagcctgcaaatcttcacaaccagacctagacaaaaacccagcaagctccaagcgacggctcaagacatccctggggaaagtgggcgtgaaagaagagctcctagcagttggcaagctcacacagacatcaggagagactacacacacacacacagagccaacaggagatggtaagagcatgaaagcatttatggagtctccaaagcagatcttagactcagcagcaagtctaactggcagcaagaggcagctgagaactcctaagggaaagtctgaagtccctgaagacctggccggcttcatcgagctcttccagacaccaagtcacactaaggaatcaatgactaatgaaaaaactaccaaagtatcctacagagcttcacagccagacctagtggacaccccaacaagctccaagccacagcccaagagaagtctcaggaaagcagacactgaagaagaatttttagcatttaggaaacaaacgccatcagcaggcaaagccatgcacacacccaaaccagcagtaggtgaagagaaagacatcaacacgtttttgggaactccagtgcagaaactggaccagccaggaaatttacctggcagcaatagacggctacaaactcgtaaggaaaaggcccaggctctagaagaactgactggcttcagagagcttttccagacaccatgcactgataaccccacagctgatgagaaaactaccaaaaaaatactctgcaaatctccgcaatcagacccagcggacaccccaacaaacacaaagcaacggcccaagagaagcctcaagaaagcagacgtagaggaagaatttttagcattcaggaaactaacaccatcagcaggcaaagccatgcacacgcctaaagcagcagtaggtgaagagaaagacatcaacacatttgtggggactccagtggagaaactggacctgctaggaaatttacctggcagcaagagacggccacaaactcctaaagaaaaggccaaggctctagaagatctggctggcttcaaagagctcttccagacaccaggtcacactgaggaatcaatgaccgatgacaaaatcacagaagtatcctgcaaatctccacaaccagacccagtcaaaaccccaacaagctccaagcaacgactcaagatatccttggggaaagtaggtgtgaaagaagaggtcctaccagtcggcaagctcacacagacgtcagggaagaccacacagacacacagagagacagcaggagatggaaagagcatcaaagcgtttaaggaatctgcaaagcagatgctggacccagcaaactatggaactgggatggagaggtggccaagaacacctaaggaagaggcccaatcactagaagacctggccggcttcaaagagctcttccagacaccagaccacactgaggaatcaacaactgatgacaaaactaccaaaatagcctgcaaatctccaccaccagaatcaatggacactccaacaagcacaaggaggcggcccaaaacacctttggggaaaagggatatagtggaagagctctcagccctgaagcagctcacacagaccacacacacagacaaagtaccaggagatgaggataaaggcatcaacgtgttcagggaaactgcaaaacagaaactggacccagcagcaagtgtaactggtagcaagaggcagccaagaactcctaagggaaaagcccaacccctagaagacttggctggcttgaaagagctcttccagacaccagtatgcactgacaagcccacgactcacgagaaaactaccaaaatagcctgcagatctccacaaccagacccagtgggtaccccaacaatcttcaagccacagtccaagagaagtctcaggaaagcagacgtagaggaagaatccttagcactcaggaaacgaacaccatcagtagggaaagctatggacacacccaaaccagcaggaggtgatgagaaagacatgaaagcatttatgggaactccagtgcagaaattggacctgccaggaaatttacctggcagcaaaagatggccacaaactcctaaggaaaaggcccaggctctagaagacctggctggcttcaaagagctcttccagacaccaggcactgacaagcccacgactgatgagaaaactaccaaaatagcctgcaaatctccacaaccagacccagtggacaccccagcaagcacaaagcaacggcccaagagaaacctcaggaaagcagacgtagaggaagaatttttagcactcaggaaacgaacaccatcagcaggcaaagccatggacaccccaaaaccagcagtaagtgatgagaaaaatatcaacacatttgtggaaactccagtgcagaaactggacctgctaggaaatttacctggcagcaagagacagccacagactcctaaggaaaaggctgaggctctagaggacctggttggcttcaaagaactcttccagacaccaggtcacactgaggaatcaatgactgatgacaaaatcacagaagtatcctgtaaatctccacagccagagtcattcaaaacctcaagaagctccaagcaaaggctcaagatacccctggtgaaagtggacatgaaagaagagcccctagcagtcagcaagctcacacggacatcaggggagactacgcaaacacacacagagccaacaggagatagtaagagcatcaaagcgtttaaggagtctccaaagcagatcctggacccagcagcaagtgtaactggtagcaggaggcagctgagaactcgtaaggaaaaggcccgtgctctagaagacctggttgacttcaaagagctcttctcagcaccaggtcacactgaagagtcaatgactattgacaaaaacacaaaaattccctgcaaatctcccccaccagaactaacagacactgccacgagcacaaagagatgccccaagacacgtcccaggaaagaagtaaaagaggagctctcagcagttgagaggctcacgcaaacatcagggcaaagcacacacacacacaaagaaccagcaagcggtgatgagggcatcaaagtattgaagcaacgtgcaaagaagaaaccaaacccagtagaagaggaacccagcaggagaaggccaagagcacctaaggaaaaggcccaacccctggaagacctggccggcttcacagagctctctgaaacatcaggtcacactcaggaatcactgactgctggcaaagccactaaaataccctgcgaatctcccccactagaagtggtagacaccacagcaagcacaaagaggcatctcaggacacgtgtgcagaaggtacaagtaaaagaagagccttcagcagtcaagttcacacaaacatcaggggaaaccacggatgcagacaaagaaccagcaggtgaagataaaggcatcaaagcattgaaggaatctgcaaaacagacaccggctccagcagcaagtgtaactggcagcaggagacggccaagagcacccagggaaagtgcccaagccatagaagacctagctggcttcaaagacccagcagcaggtcacactgaagaatcaatgactgatgacaaaaccactaaaataccctgcaaatcatcaccagaactagaagacaccgcaacaagctcaaagagacggcccaggacacgtgcccagaaagtagaagtgaaggaggagctgttagcagttggcaagctcacacaaacctcaggggagaccacgcacaccgacaaagagccggtaggtgagggcaaaggcacgaaagcatttaagcaacctgcaaagcggaacgtggacgcagaagatgtaattggcagcaggagacagccaagagcacctaaggaaaaggcccaacccctggaagacctggccagcttccaagagctctctcaaacaccaggccacactgaggaactggcaaatggtgctgctgatagctttacaagcgctccaaagcaaacacctgacagtggaaaacctctaaaaatatccagaagagttcttcgggcccctaaagtagaacccgtgggagacgtggtaagcaccagagaccctgtaaaatcacaaagcaaaagcaacacttccctgcccccactgcccttcaagaggggaggtggcaaagatggaagcgtcacgggaaccaagaggctgcgctgcatgccagcaccagaggaaattgtggaggagctgccagccagcaagaagcagagggttgctcccagggcaagaggcaaatcatccgaacccgtggtcatcatgaagagaagtttgaggacttctgcaaaaagaattgaacctgcggaagagctgaacagcaacgacatgaaaaccaacaaagaggaacacaaattacaagactcggtccctgaaaataagggaatatccctgcgctccagacgccaagataagactgaggcagaacagcaaataactgaggtctttgtattagcagaaagaatagaaataaacagaaatgaaaagaagcccatgaagacctccccagagatggacattcagaatccagatgatggagcccggaaacccatacctagagacaaagtcactgagaacaaaaggtgcttgaggtctgctagacagaatgagagctcccagcctaaggtggcagaggagagcggagggcagaagagtgcgaaggttctcatgcagaatcagaaagggaaaggagaagcaggaaattcagactccatgtgcctgagatcaagaaagacaaaaagccagcctgcagcaagcactttggagagcaaatctgtgcagagagtaacgcggagtgtcaagaggtgtgcagaaaatccaaagaaggctgaggacaatgtgtgtgtcaagaaaataacaaccagaagtcatagggacagtgaagatatttgacagaaaaatcgaactgggaaaaatataataaagttagttttgtgataagttctagtgcagtttttgtcataaattacaagtgaattctgtaagtaaggctgtcagtctgcttaagggaagaaaactttggatttgctgggtctgaatcggcttcataaactccactgggagcactgctgggctcctggactgagaatagttgaacaccgggggctttgtgaaggagtctgggccaaggtttgccctcagctttgcagaatgaagccttgaggtctgtcaccacccacagccaccctacagcagccttaactgtgacacttgccacactgtgtcgtcgtttgtttgcctatgttctccagggcacggtggcaggaacaactatcctcgtctgtcccaacactgagcaggcactcggtaaacacgaatgaatggataagcgcacggatgaatggagcttacaagatctgtctttccaatggccgggggcatttggtccccaaattaaggctattggacatctgcacaggacagtcctatttttgatgtcctttcctttctgaaaataaagttttgtgctttggagaatgactcgtgagcacatctttagggaccaagagtgactttctgtaaggagtgactcgtggcttgccttggtctcttgggaatacttttctaactagggttgctctcacctgagacattctccacccgcggaatctcagggtcccaggctgtgggccatcacgacctcaaactggctcctaatctccagctttcctgtcattgaaagcttcggaagtttactggctctgctcccgcctgttttctttctgactctatctggcagcccgatgccacccagtacaggaagtgacaccagtactctgtaaagcatcatcatccttggagagactgagcactcagcaccttcagccacgatttcaggatcgcttccttgtgagccgctgcctccgaaatctcctttgaagcccagacatctttctccagcttcagacttgtagatataactcgttcatcttcatttactttccactttgccccctgtcctctctgtgttccccaaatcagagaatagcccgccatcccccagatcacctgtctggattcctccccattcacccaccttgccaggtgcaggtgaggatggtgcaccagacagggtagctgtcccccaaaatgtgccctgtgcgggcagtgccctgtctccacgtttgtttccccagtgtctggcggggagccaggtgacatcataaatacttgctgaatgaatgcagaaatcagcggtactgacttgtactatattggctgccatgatagggttctcacagcgtcatccatgatcgtaagggagaatgacattctgcttgagggagggaatagaaaggggcagggaggggacatctgagggcttcacagggctgcaaagggtacagggattgcaccagggcagaacaggggagggtgttcaaggaagagtggctcttagcagaggcactttggaaggtgtgaggcataaatgcttccttctacgtaggccaacctcaaaactttcagtaggaatgttgctatgatcaagttgttctaacactttagacttagtagtaattatgaacctcacatagaaaaatttcatccagccatatgcctgtggagtggaatattctgtttagtagaaaaatcctttagagttcagctctaaccagaaatcttgctgaagtatgtcagcaccttttctcaccctggtaagtacagtatttcaagagcacgctaagggtggttttcattttacagggctgttgatgatgggttaaaaatgttcatttaagggctacccccgtgtttaatagatgaacaccacttctacacaaccctccttggtactgggggagggagagatctgacaaatactgcccattcccctaggctgactggatttgagaacaaatacccacccatttccaccatggtatggtaacttctctgagcttcagtttccaagtgaatttccatgtaataggacattcccattaaatacaagctgtttttactttttcgcctcccagggcctgtgcgatctggtcccccagcctctcttgggctttcttacactaactctgtacctaccatctcctgcctcccttaggcaggcacctccaaccaccacacactccctgctgttttccctgcctggaactttcccaccagccccaccaagatcatttcatccagtcctgagctcagcttaagggaggcttcttgcctgtgggttccctcacccccatgcctgtcctccaggctggggcaggttcttagtttgcctggaattgttctgtacctctttgtagcacgtagtgttgtgaaactaagccactaattgagtttctggctcccctcctggggttgtaagttttgttcattcatgagggccgactgtatttcctggttactgtatcccagtgaccagccacaggagatgtccaataaagtatgtgatgaaatggtcttaaaaaaaaaaaaaaaaaaaaaa

SEQ ID NO: 287 - DNA, 494 bp, Homo sapiens
  modified_base (285)..(285): a, c, t or g
  modified_base (423)..(423): a, c, t or g
  modified_base (451)..(451): a, c, t or g
  modified_base (456)..(456): a, c, t or g
  modified_base (461)..(461): a, c, t or g
  modified_base (468)..(468): a, c, t or g
  modified_base (476)..(476): a, c, t or g
ttttaaggctattatctcctttattcaaaaaataaatatttcactttgattcaacatatttcaaatcacattaagcacagagaagaaatacagtccctttggagattgtgaacacgtgttggaaagaggcatgatccaaacaatgggaatgaggtgagtgtggattccagctgtttcctgacccagaggttccatccctcttcaggtggagctacttatcgatttttaggagagaaaaagaagcacacacacacacacacacacacacacacacatgcgcgcgcnttttgaagtctgaaaggcacatgaagtggaccataagatgtatgggcacattcactgataaaacatcccctattccctcccaaggaaaggcggagatactttaattcaagtcaaagaccagagaaggacagggtgctnctggtttacagctcaggcaacatgaacnttttngattntggaagncttttttnttttgcgtccccctcccg

SEQ ID NO: 288 - DNA, 456 bp, Homo sapiens
  modified_base (262)..(262): a, c, t or g
  modified_base (361)..(361): a, c, t or g
  modified_base (375)..(375): a, c, t or g
  modified_base (408)..(408): a, c, t or g
  modified_base (419)..(419): a, c, t or g
  modified_base (427)..(427): a, c, t or g
ccaggtgagccccgcagccggccgcggaccccatcggcagggagaggaggcgcgggagggggacgcaaacaaaaaatggctttcatattcagagatgttcatgttgctgagctgtaagcaggagcaccctatcttctctggtctttgacttgattaaagtatctccgctttcttgggagggaataggggatgttttatcagtgaatgtgccatacatcttatggtccacttcatgtgcctttcagacttcaaagcgcgcgcnattgtgtgtgtgtgtgtgtgtgtgtgtgtgtgtgcttctttttctctcctaaaaatcgataagtagctccacctgaagagggatggaacctctggggtncagggaaacagctnggaatccacactcacctcattccccattgtttngggatccatgncctttttnccaacacgtgtttcaacaatctcccaaag

SEQ ID NO: 289 - DNA, 953 bp, Homo sapiens
agcggcgcaagcggcggcggccactgccacgtattcccggcagtggtggcgggggcggcggcggcgcccgcgggcaggaataactcaagtcacctgtactggaaatcagtttgctgaaattaatcaacgattcttgaagttgaagaaaaggaggttccagccttggcaagaggagtgtggcccttcctggaatccctctggacacaccctcctagcatcctctaggaaagatgcggcagctcaaagggaagcccaagaaggagacctccaaggacaagaaggagcggaagcaagccatgcaggaggcccggcagcagatcactacagtggtgctgcccacgctggccgtggtcgtgctcttgatcgtggtgtttgtgtacgtggccacgcgccccaccatcaccgagtgagccccgcagccggctgcggaccccatcggcagggagaggaaggcgcgggagggggacgcaaacaaaaaaatggctttcatattcagagatgttcatgttgctgagctgtaagcaggagcaccctgtcttctctggtctttgacttgattaaagtatctccgctttcttgggagggaataggggatgttttatcagtgaatgtgccatacaccttatggtccacttcatgtgcctttcagacttcaaagcgcgcgcgcatgtgtgtgtgtgtgtgtgtgtgtgtgtgtgtgtgtgtgtgcttctttttctctcctaaaaatcgataagtagctccacctgaagagggatggaacctctgggtcaggaaacagctggaatccacactcacctcattcccattgtttggatcatgcttctttccaacacgtgttcacaatctccaaagggactgtatttcttctctgtgcttaatgtgatttgaaatatgttgaatcaaagtgaaatatttattttttgaataaaggagataatagccttaaaaaa

SEQ ID NO: 290 - DNA, 176 bp, Homo sapiens
  modified_base (17)..(17): a, c, t or g
  modified_base (107)..(107): a, c, t or g
gggatgggaaaactttnttaggtttggtttccagcttcggccacgcgggctcccccccggaggctcggggaatgatgttctgggagaagagggagggcagccgaganacccagacatgcactggccccgggccccatggggtcttcccacatgcgcccatagcctgaggccattgg

SEQ ID NO: 291 - DNA, 463 bp, Homo sapiens
  modified_base (146)..(146): a, c, t or g
  modified_base (393)..(393): a, c, t or g
  modified_base (439)..(439): a, c, t or g
  modified_base (459)..(459): a, c, t or g
gagcagcagaagccggcgtcgtcggatgttgtgttgcccgccaccatgagctacacaggctttgtccagggatctgaaaccactttgcagtcgacatactcggataccagcgctcagcccacctgtgattatggatatggaacttngaactctgggacaaatagaggctacgagggctatggctatggctatggctatggccagggataacaccaccaactatgggtatggtatggccacttcacacttttgggaaatgcctagctctgacacaaatgcaaacactagtgcctcgggtagcgccagtgccgattccgttttatccagaattaaccagcgcttaggatatgggtgccgcattttggagacagacatgatgcaagggagggcttntacggctcaggttggagaaaggtattgactcttattgagttccttncgatttgaggggccttcccnagtt

SEQ ID NO: 292 - DNA, 2136 bp, Homo sapiens
gtgtgtggaggggaccctgtggttagcagcagctatcgcagcgtcggatgttcagagcagcagaagccggcgtcgtcggatgttgtgttgcccgccaccatgagctacacaggctttgtccagggatctgaaaccactttgcagtcgacatactcggataccagcgctcagcccacctgtgattatggatatggaacttggaactctgggacaaatagaggctacgagggctatggctatggctatggctatggccaggataacaccaccaactatgggtatggtatggccacttcacactcttgggaaatgcctagctctgacacaaatgcaaacactagtgcctcgggtagcgccagtgccgattccgttttatccagaattaaccagcgcttagatatggtgccgcatttggagacagacatgatgcaaggaggcgtgtacggctcaggtggagaaaggtatgactcttatgagtcctgcgactcgagggccgtcctgagtgagcgcgacctgtaccggtcaggctatgactacagcgagcttgaccctgagatggaaatggcctatgagggccaatacgatgcctaccgcgaccagttccgcatgcgtggcaacgacaccttcggtcccagggcacagggctgggcccgggatgcccggagcggccggccaatggcctcaggctatgggcgcatgtgggaagaccccatgggggcccggggccagtgcatgtctggtgcctctcggctgccctccctcttctcccagaacatcatccccgagtacggcatgttccagggcatgcgaggtgggggcgccttcccgggcggctcccgctttggtttcgggtttggcaatggcatgaagcagatgaggcggacctggaagacctggaccacagccgacttccgaaccaagaagaagaagagaaagcagggcggcagtcctgatgagccagatagcaaagccacccgcacggactgctcggacaacagcgactcagacaatgatgagggcaccgagggggaagccacagagggccttgaaggcaccgaggctgtggagaagggctccagagtggacggagaggatgaggagggaaaagaggatgggagagaagaaggcaaagaggatccagagaagggggccctaaccacccaggatgaaaatggccagaccaagcgcaagttgcaggcaggcaagaagagtcaggacaagcagaaaaagcggcagcgagaccgcatggtggaaaggatccagtttgtgtgttctctgtgcaaataccggaccttctatgaggacgagatggccagccatcttgacagcaagttccacaaggaacactttaagtacgtaggcaccaagctccctaagcagacggctgactttctgcaggagtacgtcactaacaagaccaagaagacagaggagctccgaaaaaccgtggaggaccttgatggcctcatccaccaaatctacagagaccaggatctgacccaggaaattgccatggagcattttgtgaagaaggtggaggcagcccattgtgcagcctgcgacctcttcattcccatgcagtttgggatcatccagaagcatctgaagaccatggatcacaaccggaaccgcaggctcatgatggagcagtccaagaagtcctccctcatggtggcccgcagtattctcaacaacaagctcatcagcaagaagctggagcgctacctgaagggcgagaaccctttcaccgacagccccgaggaggagaaggagcaggaggaggctgagggcggtgccctggacgagggggcgcagggcgaagcggcagggatctcggagggcgcagagggcgtgccggcgcagcctcccgtgcccccagagccagcccccggggccgtgtcgccgccaccgccgccgcccccagaggaggaggaggagggcgccgtgcccttgctgggaggggcgctgcaacgccagatccgcggcatcccgggcctcgacgtggaggacgacgaggagggcggcgggggcgccccgtgacccgagctcggggcgggcggagcccgcgtggccgaagctggaaaccaaacctaataaagttttcccatcccaccaaaaaaaaaaaaaaaaaaaaaa

SEQ ID NO: 293 - DNA, 409 bp, Homo sapiens
  modified_base (380)..(380): a, c, t or g
ggcagaatggcctaagagttcttttccctgagaaaggagaaaaagatgggattgccactcacccacccacacttggtaagggaggagaatttgtgcttctggagcttctcaagggattgtgttttgcaggtacagaaaactgcctgttatcttcaagccaggttttcgagggcacatgggtcaccagttgctttttcagtcaatttggccgggatggactaatgaggctctaacactgctcaggagacccctgccctctagttggttctgggctttgatctcttccaacctgcccagtcacagaaggaggaatgactcaaatgcccaaaaccaagaacacattgcagaagtaagacaaacatgtatatttttaaatgttncttaaccttaaggacctgttcttcttcta

SEQ ID NO: 294 - DNA, 4119 bp, Homo sapiens
ctggagagcctgctgcccgcccgcccgtaaaatggtcccctcggctggacagctcgccctgttcgctctgggtattgtgttggctgcgtgccaggccttggagaacagcacgtccccgctgagtgcagacccgcccgtggctgcagcagtggtgtcccattttaatgactgcccagattcccacactcagttctgcttccatggaacctgcaggtttttggtgcaggaggacaagccagcatgtgtctgccattctgggtacgttggtgcacgctgtgagcatgcggacctcctggccgtggtggctgccagccagaagaagcaggccatcaccgccttggtggtggtctccatcgtggccctggctgtccttatcatcacatgtgtgctgatacactgctgccaggtccgaaaacactgtgagtggtgccgggccctcatctgccggcacgagaagcccagcgccctcctgaagggaagaaccgcttgctgccactcagaaacagtggtctgaagagcccagaggaggagtttggccaggtggactgtggcagatcaataaagaaaggcttcttcaggacagcactgccagagatgcctgggtgtgccacagaccttcctacttggcctgtaatcacctgtgcagccttttgtgggccttcaaaactctgtcaagaactccgtctgcttggggttattcagtgtgacctagagaagaaatcagcggaccacgatttcaagacttgttaaaaaagaactgcaaagagacggactcctgttcacctaggtgaggtgtgtgcagcagttggtgtctgagtccacatgtgtgcagttgtcttctgccagccatggattccaggctatatatttctttttaatgggccacctccccacaacagaattctgcccaacacaggagatttctatagttattgttttctgtcatttgcctactggggaagaaagtgaaggaggggaaactgtttaatatcacatgaagaccctagctttaagagaagctgtatcctctaaccacgagactctcaaccagcccaacatcttccatggacacatgacattgaagaccatcccaagctatcgccacccttggagatgatgtcttatttattagatggataatggttttatttttaatctcttaagtcaatgtaaaaagtataaaaccccttcagacttctacattaatgatgtatgtgttgctgactgaaaagctatactgattagaaatgtctggcctcttcaagacagctaaggcttgggaaaagtcttccagggtgcggagatggaaccagaggctgggttactggtaggaataaaggtaggggttcagaaatggtgccattgaagccacaaagccggtaaatgcctcaatacgttctgggagaaaacttagcaaatccatcagcagggatctgtcccctctgttggggagagaggaagagtgtgtgtgtctacacaggataaacccaatacatattgtactgctcagtgattaaatgggttcacttcctcgtgagccctcggtaagtatgtttagaaatagaacattagccacgagccataggcatttcaggccaaatccatgaaagggggaccagtcatttattttccattttgttgcttggttggtttgttgctttatttttaaaaggagaagtttaactttgctatttattttcgagcactaggaaaactattccagtaatttttttttcctcatttccattcaggatgccggctttattaacaaaaactctaacaagtcacctccactatgtgggtcttcctttcccctcaagagaaggagcaattgttcccctgacatctgggtccatctgacccatggggcctgcctgtgagaaacagtgggtcccttcaaatacatagtggatagctcatccctaggaattttcattaaaatttggaaacagagtaatgaagaaataatatataaactccttatgtgaggaaatgctactaatatctgaaaagtgaaagatttctatgtattaactcttaagtgcacctagcttattacatcgtgaaaggtacatttaaaatatgttaaattggcttgaaattttcagagaattttgtcttcccctaattcttcttccttggtctggaagaacaatttctatgaattttctctttattttttttttataattcagacaattctatgacccgtgtcttcatttttggcactcttatttaacaatgccacacctgaagcacttggatctgttcagagctgaccccctagcaacgtagttgacacagctccaggtttttaaattactaaaataagttcaagtttacatcccttgggccagatatgtgggttgaggcttgactgtagcatcctgcttagagaccaatcaatggacactggtttttagacctctatcaatcagtagttagcatccaagagactttgcagaggcgtaggaatgaggctggacagatggcggaacgagaggttccctgcgaagacttgagatttagtgtctgtgaatgttctagttcctaggtccagcaagtcacacctgccagtgccctcatccttatgcctgtaacacacatgcagtgagaggcctcacatatacgcctccctagaagtgccttccaagtcagtcctttggaaaccagcaggtctgaaaaagaggctgcatcaatgcaagcctggttggaccattgtccatgcctcaggatagaacagcctggcttatttggggatttttcttctagaaatcaaatgactgataagcattggctccctctgccatttaatggcaatggtagtctttggttagctgcaaaaatactccatttcaagttaaaaatgcatcttctaatccatctctgcaagctccctgtgtttccttgccctttagaaaatgaattgttcactacaattagagaatcatttaacatcctgacctggtaagctgccacacacctggcagtggggagcatcgctgtttccaatggctcaggagacaatgaaaagcccccatttaaaaaaataacaaacattttttaaaaggcctccaatactcttatggagcctggatttttcccactgctctacaggctgtgactttttttaagcatcctgacaggaaatgttttcttctacatggaaagatagacagcagccaaccctgatctggaagacagggccccggctggacacacgtggaaccaagccagggatgggctggccattgtgtccccgcaggagagatgggcagaatggccctagagttcttttccctgagaaaggagaaaaagatgggattgccactcacccacccacactggtaagggaggagaatttgtgcttctggagcttctcaagggattgtgttttgcaggtacagaaaactgcctgttatcttcaagccaggttttcgagggcacatgggtcaccagttgctttttcagtcaatttggccgggatggactaatgaggctctaacactgctcaggagacccctgccctctagttggttctgggctttgatctcttccaacctgcccagtcacagaaggaggaatgactcaaatgcccaaaaccaagaacacattgcagaagtaagacaaacatgtatatttttaaatgttctaacataagacctgttctctctagccattgatttaccaggctttctgaaagatctagtggttcacacagagagagagagagtactgaaaaagcaactcctcttcttagtcttaataatttactaaaatggtcaacttttcattatctttattataataaacctgatgcttttttttagaactccttactctgatgtctgtatatgttgcactgaaaaggttaatatttaatgttttaatttattttgtgtggtaagttaattttgatttctgtaatgtgttaatgtgattagcagttattttccttaatatctgaattatacttaaagagtagtgagcaatataagacgcaattgtgtttttcagtaatgtgcattgttattgagttgtactgtaccttatttggaaggatgaaggaatgaacctttttttcctaaaaaaaaaaaaaaaaaaaaaaaaaaaaaaaaa

SEQ ID NO: 295 - DNA, 361 bp, Homo sapiens
  modified_base (25)..(27): a, c, t or g
  modified_base (67)..(67): a, c, t or g
  modified_base (80)..(80): a, c, t or g
  modified_base (102)..(102): a, c, t or g
  modified_base (120)..(120): a, c, t or g
  modified_base (133)..(133): a, c, t or g
  modified_base (143)..(143): a, c, t or g
  modified_base (176)..(176): a, c, t or g
  modified_base (183)..(183): a, c, t or g
  modified_base (215)..(215): a, c, t or g
  modified_base (218)..(218): a, c, t or g
  modified_base (244)..(244): a, c, t or g
  modified_base (267)..(267): a, c, t or g
  modified_base (320)..(320): a, c, t or g
  modified_base (340)..(340): a, c, t or g
ttttttttttcgtgacacaaacatnnngttctttttattcacaaaacagcctggtttcctaaaacantacaaacagcatnttcatcagcaggaagctggccntgggaggggggcccaggncgcagggggcccntggggaccancccccaccagcaggggaccacgcaaagaagccnttttttnttttgccattagcaaggccagaaaaaaagganttnttttctctaagaaaagtagccagggnttgggaaatatcgagatgggggntccccagatcgcaatgggataaacgaacagaactttcatttttttttccaaantcacttttgggggtgggggntcccagtctcggggactttgg

SEQ ID NO: 296 - DNA, 438 bp, Homo sapiens
  modified_base (212)..(212): a, c, t or g
  modified_base (282)..(282): a, c, t or g
  modified_base (351)..(351): a, c, t or g
  modified_base (384)..(384): a, c, t or g
  modified_base (407)..(407): a, c, t or g
  modified_base (412)..(412): a, c, t or g
  modified_base (434)..(434): a, c, t or g
ccaccctcatttaaacttcctttgattctttccgaccatgaaatagtgcatagtttgcctggagaatccactcacgttcataaagagaatgttgatggcgccgtgtagaagccgctctgtatccatccacgcgtgcagagctgccagcagggagctcacagaaggggagggagcaccaggccagctgagctgcacccacagtcccgagactnggatcccccaccccaacagtgattttggaaaaaaaaatgaaagttctgttcgtttatccattgcgatctngggagccccatctcgatatttccaatcctgggctacttttcttaggagaaaataagtcctttttttctngccttgctaattggcaaccagaaggaaaggggnttcttttgcgttggttcccttgntggtngggggttgggtcccccaggggncccc

SEQ ID NO: 297 - DNA, 2632 bp, Homo sapiens
ggcggctgagcctgagcggggatgtagaggcggcggcagcagaggcggcactggcggcaagagcagacgcccgagccgagcgagaagagcggcagagccttatcccctgaagccgggccccgcgtcccagccctgcccagcccgcgcccagccatgcgcgccgcctgctgagtccgggcgccgcacgctgagccctccgcccgcgagccgcgctcagctcgggggtgattagttgctttttgttgttttttaatttgggccgcggggagggggaggaggggcaggtgctgcaggctcccccccctccccgcctcgggccagccgcggcggcgcgactcgggctccggacccgggcactgctggcggctggagcggagcgcaccgcggcggtggtgcccagagcggagcgcagctccctgccccgcccctccccctcggcctcgcggcgacggcggcggtggcggcttggacgactcggagagccgagtgaagacatttccacctggacacctgaccatgtgcctgccctgagcagcgaggcccaccaggcatctctgttgtgggcagcagggccaggtcctggtctgtggaccctcggcagttggcaggctccctctgcagtggggtctgggcctcggccccaccatgtcgagcctcggcggtggctcccaggatgccggcggcagtagcagcagcagcaccaatggcagcggtggcagtggcagcagtggcccaaaggcaggagcagcagacaagagtgcagtggtggctgccgccgcaccagcctcagtggcagatgacacaccaccccccgagcgtcggaacaagagcggtatcatcagtgagcccctcaacaagagcctgcgccgctcccgcccgctctcccactactcttcttttggcagcagtggtggtagtggcggtggcagcatgatgggcggagagtctgctgacaaggccactgcggctgcagccgctgcctccctgttggccaatgggcatgacctggcggcggccatggcggtggacaaaagcaaccctacctcaaagcacaaaagtggtgctgtggccagcctgctgagcaaggcagagcgggccacggagctggcagccgagggacagctgacgctgcagcagtttgcgcagtccacagagatgctgaagcgcgtggtgcaggagcatctcccgctgatgagcgaggcgggtgctggcctgcctgacatggaggctgtggcaggtgccgaagccctcaatggccagtccgacttcccctacctgggcgctttccccatcaacccaggcctcttcattatgaccccggcaggtgtgttcctggccgagagcgcgctgcacatggcgggcctggctgagtaccccatgcagggagagctggcctctgccatcagctccggcaagaagaagcggaaacgctgcggcatgtgcgcgccctgccggcggcgcatcaactgcgagcagtgcagcagttgtaggaatcgaaagactggccatcagatttgcaaattcagaaaatgtgaggaactcaaaaagaagccttccgctgctctggagaaggtgatgcttccgacgggagccgccttccggtggtttcagtgacggcggcggaacccaaagctgccctctccgtgcaatgtcactgctcgtgtggtctccagcaagggattcgggcgaagacaaacggatgcacccgtctttagaaccaaaaatattctctcacagatttcattcctgtttttatatatatattttttgttgtcgttttaacatctccacgtccctagcataaaaagaaaaagaaaaaaatttaaactgctttttcggaagaacaacaacaaaaaagaggtaaagacgaatctataaagtaccgagacttcctgggcaaagaatggacaatcagtttccttcctgtgtcgatgtcgatgttgtctgtgcaggagatgcagtttttgtgtagagaatgtaaattttctgtaaccttttgaaatctagttactaataagcactactgtaatttagcacagtttaactccaccctcatttaaacttcctttgattctttccgaccatgaaatagtgcatagtttgcctggagaatccactcacgttcataaagagaatgttgatggcgccgtgtagaagccgctctgtatccatccacgcgtgcagagctgccagcagggagctcacagaaggggagggagcaccaggccagctgagctgcacccacagtcccgagactgggatcccccaccccaacagtgattttggaaaaaaaaatgaaagttctgttcgtttatccattgcgatctggggagccccatctcgatatttccaatcctggctacttttcttagagaaaataagtcctttttttctggccttgctaatggcaacagaagaaagggcttctttgcgtggtcccctgctggtgggggtgggtccccagggggccccctgcggcctgggcccccctgcccacggccagcttcctgctgatgaacatgctgtttgtattgttttaggaaaccaggctgttttgtgaataaaacgaatgcatgtttgtgtcacgaaaaaaaaaaaaaaaaaaaaaaaaaaaaaaaaaaaaaaaaaaaaa

SEQ ID NO: 298 - DNA, 498 bp, Homo sapiens
  modified_base (17)..(17): a, c, t or g
  modified_base (99)..(99): a, c, t or g
  modified_base (450)..(450): a, c, t or g
  modified_base (478)..(478): a, c, t or g
aagtcatgattaatttnaaaccagttaaatttttaaccctttgcaggaattgctgaggggagaagacagggggagaatccacggcagaaaagccagagntgggcctcacaaatgagaaacaggagcctttctttcctgcccacagcctctttttctagccacctgctccagaaggaaagtcagtgacaagtctggaatacatgcttggagtaaatggtgactcagatgaaaagcagtcggcaaaactgaggagaggggaggagaggtggggagatgatggcctggggcaaggggaagggcgtcaagccccaagccagggctgctgggaacacccagcctgtgatggccatatcagacccccgggactggacacgaacccatcccaacgcaaaaagcaaataaataacaaattttttaacttttttcttcacaggggagctggggttggantcggggagaaagggggacagggcctggnccttttgaaggagagagcca

SEQ ID NO: 299 - DNA, 10531 bp, Homo sapiens
taggagccggaggaggagccgccgccgccgttgacccggccgccggccgggagctgggagagatgcggagcccggccaccggcgtccccctcccaacgccgccgccgccgctgctgctgctgttgctgctgctgctgccgccgccactattgggagaccaagtggggccctgtcgttccttggggtccaggggacgaggctcttcgggggcctgcgcccccatgggctggctctgtccatcctcagcgtcgaacctctggctctacaccagccgctgcagggatgcgggcactgagctgactggccacctggtaccccaccacgatggcctgagggtttggtgtccagaatccgaggcccatattcccctaccaccagctcctgaaggctgcccctggagctgtcgcctcctgggcattggaggccacctttccccacagggcaagctcacactgcccgaggagcacccgtgcttaaaggctccacggctcagatgccagtcctgcaagctggcacaggcccccgggctcagggcaggggaaaggtcaccagaagagtccctgggtgggcgtcggaaaaggaatgtaaatacagccccccagttccagccccccagctaccaggccacagtgccggagaaccagccagcaggcacccctgttgcatccctgagggccatcgacccggacgagggtgaggcaggtcgactggagtacaccatggatgccctctttgatagccgctccaaccagttcttctccctggacccagtcactggtgcagtaaccacagccgaggagctggatcgtgagaccaagagcacccacgtcttcagggtcacggcgcaggaccacggcatgccccgacgaagtgccctggctacactcaccatcttggttactgacaccaatgaccatgaccctgtgttcgagcagcaggagtacaaggagagcctcagggagaacctggaggttggctatgaggtgctcactgtcagggccacggatggtgatgcccctcccaatgccaatattctgtaccgcctgctggaggggtctgggggcagcccctctgaagtctttgagatcgaccctcgctctggggtgatccgaacccgtggccctgtggatcgggaagaggtggaatcctaccagctgacggtagaggcaagtgaccagggtcgggacccgggtcctcggagtaccacagccgctgttttcctttctgtggaggatgacaatgataatgccccccagtttagtgagaagcgctatgtggtccaggtgagggaggatgtgactccaggggccccagtactccgagtcacagcctcggatcgagacaaggggagcaatgccgtggtgcactatagcatcatgagtggcaatgctcggggacagttttatctggatgcccagactggagctctggatgtggtgagccctcttgactatgagacgaccaaggagtacaccctacgggtgcgagcacaggatggtggccgtcccccactctctaatgtctctggcttggtgacagtacaggtcctggatatcaacgacaatgcccccatcttcgtcagcacccctttccaggctactgtcctggagagcgtccccttaggctacctggttctccatgtccaggctatcgacgctgatgctggtgacaatgcccgcctggaataccgccttgctggggtgggacatgacttccccttcaccatcaacaatggcacaggctggatctctgtggctgctgaactggaccgggaggaagttgatttctacagctttggggtagaagctcgagaccatggcactccagcactcactgcctcggccagtgtcagcgtgactgtcctggatgtcaacgacaacaatccaacctttacccaaccagagtacacagtgcggctcaatgaggatgcagctgtgggcaccagcgtggtgacggtgtcagctgtggaccgtgatgctcatagtgtcatcacctaccagatcaccagtggcaatactcgaaaccgcttctccatcaccagccaaagtggtggtgggctggtatcccttgccctgccactggactacaaacttgagcggcagtatgtgttggctgttaccgcctccgatggcactcggcaggacacggcacagattgtggtgaatgtcaccgacgccaacacccatcgtcctgtctttcagagctcccactatacagtgaatgttaatgaggaccggccggcaggcaccacggtggtgctgatcagcgccacggatgaggacacaggtgagaatgcccgcatcacctacttcatggaggacagcatcccccagttccgcatcgatgcagacacgggggctgtcaccacccaggctgagctggactacgaagaccaagtgtcttacaccctggccattactgctcgggacaatggcattccccagaagtccgacaccacctacctggagatcctggtgaacgacgtgaatgacaatgcccctcagttcctgcgagactcctaccagggcagtgtctatgaggatgtgccacccttcactagcgtcctgcagatctcagccactgatcgtgattctggacttaatggcagggtcttctacaccttccaaggaggcgacgatggagacggtgactttattgttgagtccacgtcaggcatcgtgcgaacgctacggaggctggatcgagagaacgtggcccagtatgtcttgcgggcatatgcagtggacaaggggatgcccccagcccgcacacctatggaagtgacagtcactgtgttggatgtgaatgacaatccccctgtctttgagcaggatgagtttgatgtgtttgtggaagagaacagccccattgggctagccgtggcccgggtcacagccactgaccccgatgaaggcaccaatgcccagattatgtaccagattgtggagggcaacatccctgaggtcttccagctggacatcttctccggggagctgacagccctggtagacttagactacgaggaccggcctgagtacgtcctggtcatccaggccacgtcagctcctctggtgagccgggctacagtccacgtccgcctccttgaccgcaatgacaacccaccagtgctgggcaactttgagatccttttcaacaactatgtcaccaatcgctcaagcagcttccctgggggtgccattggccgagtacctgcccatgaccctgatatctcagatagtctgacttacagctttgagcggggaaatgaactcagcctggtcctgctcaatgcctccacgggtgagctgaagctaagccgcgcactggacaacaaccggcctctggaggccatcatgagcgtgctggtgtcagacggcgtacacagcgtgaccgcccagtgcgcgctgcgtgtgaccatcatcaccgatgagatgctcacccacagcatcacgctgcgcctggaggacatgtcacccgagcgcttcctgtcaccactgctaggcctcttcatccaggcggtggccgccacgctggccacgccaccggaccacgtggtggtcttcaacgtacagcgggacaccgacgcccccgggggccacatcctcaacgtgagcctgtcggtgggccagccgccagggcccgggggcgggccgcccttcctgccctctgaggacctgcaggagcgcctatacctcaaccgcagcctgctgacggccatctcggcacagcgcgtgctgcccttcgacgacaacatctgcctgcgggagccctgcgagaactacatgcgctgcgtgtcggtgctgcgcttcgactcctccgcgcccttcatcgcctcctcctccgtgctcttccggcccatccaccccgtcggagggctgcgctgccgctgcccgcccggcttcacgggtgactactgcgagaccgaggtggacctctgctactcgcggccctgtggcccccacgggcgctgccgcagccgcgagggcggctacacctgcctctgtcgtgatggctacacgggtgagcactgtgaggtgagtgctcgctcaggccgttgcaccccgggtgtctgcaagaatgggggcacctgtgtcaacctgctggtgggcggtttcaagtgcgattgcccatctggagacttcgagaagccctactgccaggtgaccacgcgcagcttccccgcccactccttcatcacctttcgcggcctgcgccagcgtttccacttcaccctggccctctcgtttgccacaaaggagcgcgacgggttgctgttgtacaatgggcgtttcaatgagaagcatgactttgtggccctcgaggtgatccaggagcaggtccagctcaccttctctgcaggggagtcaaccaccacggtgtccccattcgtgcccggaggagtcagtgatggccagtggcatacggtgcagctgaaatactacaataagccactgttgggtcagacagggctcccacagggcccatcagagcagaaggtggctgtggtgaccgtggatggctgtgacacaggagtggccttgcgcttcggatctgtcctgggcaactactcctgtgctgcccagggcacccagggtggcagcaagaagtctctggatctgacggggcccctgctactaggcggggtgcctgacctgcccgagagcttcccagtccgaatgcggcagttcgtgggctgcatgcggaacctgcaggtggacagccggcacatagacatggctgacttcattgccaacaatggcaccgtgcctggctgccctgccaagaagaacgtgtgtgacagcaacacttgccacaatgggggcacttgcgtgaaccagtgggacgcgttcagctgcgagtgccccctgggctttgggggcaagagctgcgcccaggaaatggccaatccacagcacttcctgggcagcagcctggtggcctggcatggcctctcgctgcccatctcccaaccctggtacctcagcctcatgttccgcacgcgccaggccgacggtgtcctgctgcaggccatcaccagggggcgcagcaccatcaccctacagctacgagagggccacgtgatgctgagcgtggagggcacagggcttcaggcctcctctctccgtctggagccaggccgggccaatgacggtgactggcaccatgcacagctggcactgggagccagcggggggcctggccatgccattctgtccttcgattatgggcagcagagagcagagggcaacctgggcccccggctgcatggtctgcacctgagcaacataacagtgggcggaatacctgggccagccggcggtgtggcccgtggctttcggggctgtttgcagggtgtgcgggtgagcgatacgccagagggggttaacagcctggatcccagccatggggagagcatcaacgtggagcaaggctgtagcctgcctgacccttgtgactcaaacccgtgtcctgctaacagctattgcagcaacgactgggacagctattcctgcagctgtgatccaggttactatggtgacaactgtactaatgtgtgtgacctgaacccgtgtgagcaccagtctgtgtgtacccgcaagcccagtgccccccatggctatacctgcgagtgtcccccaaattaccttgggccatactgtgagaccaggattgaccagccttgtccccgtggctggtggggacatcccacatgtggcccatgcaactgtgatgtcagcaaaggctttgacccagactgcaacaagacaagcggcgagtgccactgcaaggagaaccactaccggcccccaggcagccccacctgcctcttgtgtgactgctaccccacaggctccttgtccagagtctgtgaccctgaggatggccagtgtccatgcaagccaggtgtcatcgggcgtcagtgtgaccgctgtgacaacccttttgctgaggtcaccaccaatggctgtgaagtgaattatgacagctgcccacgagcgattgaggctgggatctggtggccccgtacccgcttcgggctgcctgctgctgctccctgtcccaaaggctcctttgggactgctgtgcgccactgtgatgagcacagggggtggctccccccaaacctcttcaactgcacgtccatcaccttctcagaactgaagggcttcgctgagcggctacagcggaatgagtcaggcctagactcagggcgctcccagcagctagccctgctcctgcgcaacgccacgcagcacacagctggctacttcggcagcgacgtcaaggtggcctaccagctggccacgcggctgctggcccacgagagcacccagcggggctttgggctgtctgccacacaggacgtgcacttcactgagaatctgctgcgggtgggcagcgccctcctggacacagccaacaagcggcactgggagctgatccagcagacagagggtggcaccgcctggctgctccagcactatgaggcctacgccagtgccctggcccagaacatgcggcacacctacctaagccccttcaccatcgtcacgcccaacattgtcatctccgtagtgcgcttggacaaagggaactttgctggggccaagctgccccgctacgaggccctgcgtggggagcagcccccggaccttgagacaacagtcattctgcctgagtctgtcttcagagagacgccccccgtggtcaggcccgcaggccccggagaggcccaggagccagaggagctggcacggcgacagcgacggcacccggagctgagccagggtgaggctgtggccagcgtcatcatctaccgcaccctggccgggctactgcctcataactatgaccctgacaagcgcagcttgagagtccccaaacgcccgatcatcaacacacccgtggtgagcatcagcgtccatgatgatgaggagcttctgccccgggccctggacaaacccgtcacggtgcagttccgcctgctggagacagaggagcggaccaagcccatctgtgtcttctggaaccattcaatcctggtcagtggcacaggtggctggtcggccagaggctgtgaagtcgtcttccgcaatgagagccacgtcagctgccagtgcaaccacatgacgagcttcgctgtgctcatggacgtttctcggcgggagaatggggagatcctgccactgaagacactgacatacgtggctctaggtgtcaccttggctgcccttctgctcaccttcttcttcctcactctcttgcgtatcctgcgctccaaccaacacggcatccgacgtaacctgacagctgccctgggcctggctcagctggtcttcctcctgggaatcaaccaggctgacctcccttttgcctgcacagtcattgccatcctgctgcacttcctgtacctctgcaccttttcctgggctctgctggaggccttgcacctgtaccgggcactcactgaggtgcgcgatgtcaacaccggccccatgcgcttctactacatgctgggctggggcgtgcctgccttcatcacagggctagccgtgggcctggaccccgagggctacgggaaccctgacttctgctggctctccatctatgacacgctcatctggagttttgctggcccggtggcctttgccgtctcgatgagtgtcttcctgtacatcctggcggcccgggcctcctgtgctgcccagcggcagggctttgagaagaaaggtcctgtctcgggcctgcagccctccttcgccgtcctcctgctgctgagcgccacgtggctgctggcactgctctctgtcaacagcgacaccctcctcttccactacctctttgctacctgcaattgcatccagggccccttcatcttcctctcctatgtggtgcttagcaaggaggtccggaaagcactcaagcttgcctgcagccgcaagcccagccctgaccctgctctgaccaccaagtccaccctgacctcgtcctacaactgccccagcccctacgcagatgggcggctgtaccagccctacggagactcggccggctctctgcacagcaccagtcgctcgggcaagagtcagcccagctacatccccttcttgctgagggaggagtccgcactgaaccctggccaagggccccctggcctgggggatccaggcagcctgttcctggaaggtcaagaccagcagcatgatcctgacacggactccgacagtgacctgtccttagaagacgaccagagtggctcctatgcctctacccactcatcagacagtgaggaggaagaagaggaggaggaagaggaggccgccttccctggagagcagggctgggatagcctgctggggcctggagcagagagactgcccctgcacagtactcccaaggatgggggcccagggcctggcaaggccccctggccaggagactttgggaccacagcaaaagagagtagtggcaacggggcccctgaggagcggctgcgggagaatggagatgccctgtctcgagaggggtccctaggcccccttccaggctcttctgcccagcctcacaaaggcatccttaagaagaagtgtctgcccaccatcagcgagaagagcagcctcctgcggctccccctggagcaatgcacagggtcttcccggggctcctccgctagtgagggcagccggggcggcccccctccccgcccaccgccccggcagagcctccaggagcagctgaacggggtcatgcccatcgccatgagcatcaaggcaggcacggtggatgaggactcgtcaggctccgaatttctcttctttaacttcctgcattaaccctgggccgtggttcctacgcccgaggctcccttcccttccccagccgcactcatgccctgctcctgtcttgtgctttatcctgccccgctccccatcgcctgcccgcagcagcgacgaaacgtccatctgaggagcctgggccttgccgggaggggtactcaccccacctaaggccatctagtgccaactccccccccaccattcccctcactgcactttggacccctggggccaacatctccaagacaaagtttttcagaaaagaggaaaaaaagaatttaaaaaaggatctccactcttcatgacttcagggattcattttttttatacgctggaaattgactcccctttcccttcccaaagaggataggacctcccaggatgcttcccagcctctcctcagtttcccatctgctgtgcctctgggaggagagggactcctggggggcctgcccctcatacgccatcaccaaaaggaaaggacaaagccacacgcagccagggcttcacacccttcaggctgcacccgggcaggcctcagaacggtgaggggccagggcaaagggtgtgtctcgtcctgcccgcactgcctctcccaggaactggaaaagccctgtccggtgagggggcagaaggactcagcgcccctggacccccaaatgctgcatgaacacattttcaggggagcctgtgcccccaggcgggggtcgggcagccccagcccctctccttttcctggactctggccgtgcgcggcagcccaggtgtttgctcagttgctgacccaaaagtgcttcatttttcgtgcccgccccgcgccccgggcaggccagtcatgtgttaagttgcgcttctttgctgtgatgtgggtgggggaggaagagtaaacacagtgctggctcggctgccctgagggtgctcaatcaagcacaggtttcaagtctgggttctggtgtccactcacccaccccaccccccaaaatcagacaaatgctactttgtctaacctgctgtggcctctgagacatgttctatttttaaccccttcttggaattggctctcttcttcaaaggaccaggtcctgttcctctttctccccgactccaccccagctccctgtgaagagagagttaatatatttgttttatttatttgctttttgcgttgggatgggttcgtgtccagtcccgggggtctgatatggccatcacaggctgggtgttcccagcagccctggcttgggggcttgacgcccttccccttgccccaggccatcatctccccacctctcctcccctctcctcagttttgccgactgcttttcatctgagtcaccatttactccaagcatgtattccagacttgtcactgactttccttctggagcaggtggctagaaaaagaggctgtgggcaggaaagaaaggctcctgtttctcatttgtgaggccagcctctggcttttctgccgtggattctccccctgtcttctcccctcagcaattcctgcaaagggttaaaaatttaactggtttttactactgatgacttaaaaaaaatacaaagatgctggatgctaacttgatactaaccatcagattgtacagtttggttgttgctgtaaatatggtagcgttttgttgttgttgttttttcatgccccatactactgaataaactagttctgtgcgggt

SEQ ID NO: 300 - DNA, 322 bp, Homo sapiens
tttttaagaaacaatatattttatttttctgacaccacagctctggcgagtggttttgtaccaaatttaatggaggttacacagaacgtcttacgcatgggagggggaggaaagggaaggaaccacaaaatttaaaacaaacagaaacaaaatcctggatagcttttagcatctgttccactcccacattaataaaattcacttgggaattcctaataaaaggagaacagaaaacaaggtgggcagggaagggtatgatgggaaagagaaagacttagggggaaaaaagaccagagagcatcccaaggacagacctttccct

SEQ ID NO: 301 - DNA, 6267 bp, Homo sapiens
cttccatgtgtgaaagctacttggcatgaatgcctgggccgtaccaagtgtcaccgcagcaagagggggagtcagaagaaaaacagatcagaccaagcagacaataggcccctaaagtgttccccctaagttgctttgatgttgtcctggtgtcttgataccaggaggccagggattgcgggaaaagggtcttttttgtcttcattcactttcccccctcagtttctgaaatgattctccagaatttctcctcataaaaaaggactgaatgtgggcccagttggcgtcattctgctttgacctaaacattcccatctgattgggtggcagagatcatttttggaaagttcttccgtgtcccgatgtagaagaaatagcaaattggacatattgaaagacaagggtcatctttgagaagggggttcctggactcctcacctccaggatgagcactgcagtgtcgtgacccttggggttttgtatgccctggagatgcgagattttcctctggcagcaggaggcacgcacccagagaatgctggagctgcaaggggaaaggacccacttccacagcagagaaaaacaaagaggaaaaaggcatacaggcagcgagcgctaagggacgcacccagcaagcagtgggccagtgccactgcccccagcagctgtttctgctgcaacccgagaggaactcggtgagcctgtcccgtttgtgactgcaagctcaggatttcaatcaatgcattccagtaaccctaaagtgaggagctctccatcaggaaacacacagagtagccctaagtcaaagcaggaggtgatggtccgtccccctacagtgatgtccccatctggaaacccccagctggattccaaattctccaatcagggtaaacaggggggctcagccagccaatcccagccatccccctgtgactccaagagtgggggccatacccctaaagcactccctggcccaggtgggagcatggggctgaagaatggggctggaaatggtgccaagggcaaggggaaaagggagcgaagtatttccgccgactcctttgatcagagagatcctgggactccaaacgatgactctgacattaaagaatgtaattctgctgaccacataaagtcccaggattcccagcacacaccacactcgatgaccccatcaaatgctacagcccccaggtcttctaccccctcccatggccaaactactgccacagagcccacacctgctcagaagactccagccaaagtggtgtacgtgttttctactgagatggccaataaagctgcagaagctgttttgaagggccaggttgaaactatcgtctctttccacatccagaacatttctaacaacaagacagagagaagcacagcgcctctgaacacacagatatctgcccttcggaatgatccgaaacctctcccacaacagcccccagttccggccaaccaggaccagaattcttcccagaataccagactgcagccaactccacccattccggcaccagcacccaagcctgccgcacccccacgtcccctggaccgggagagtcctggggtagaaaacaaactgattccttctgtaggaagtcctgccagctccactccactgcccccagatggtactgggcccaactcaactcccaacaatagggcagtgacccctgtctcccaggggagcaatagctcttcagcagatcccaaagcccctccgcctccaccagtgtccagtggcgagccccccacactgggagagaatcccgatggcttatctcaggagcagctggagcaccgggagcgctccttacaaactctcagagatatccagcgcatgctttttcctgatgagaaagaattcacaggagcacaaagtgggggaccgcagcagaatcctggggtattagatgggcctcagaaaaaaccagaagggccaatacaggccatgatggcccaatcccaaagcctaggtaagggacctgggccccggacagacgtgggagctccatttggccctcaaggacatagagatgtacccttttctccagatgaaatggttccaccttctatgaactcccagtctgggaccataggacccgaccaccttgaccatatgactcccgagcagatagcgtggctgaaactgcagcaggagttttatgaagagaagaggaggaagccggaacaagtggttgtccagcagtgttccctccaggacatgatggtccatcagcacgggcctcggggagtggtccgaggacccccccctccataccagatgacccctagtgaaggctgggcacctgggggtacagagccattttctgatggtatcaacatgccacattctctgcccccgaggggcatggctccccaccccaacatgccagggagccagatgcgcctccctggatttgcaggcatgataaactctgaaatggaagggccgaatgtccccaaccctgcatctagaccaggtctttctggagtcagttggccagatgatgtgccaaaaatcccagatggtcgaaattttcctcctggccggggcattttcagcggccctggccgaggggaacgcttcccaaacccccaaggattgtctgaagagatgtttcagcagcagctggcagagaaacagctgggtctccccccagggatggccatggaaggcatcaggcccagcatggagatgaacaggatgattccaggctcccagcgccacatggagcctgggaataaccccattttccctcgaataccagttgagggccctctgagtccttctaggggtgactttccaaaaggaattcccccacagatgggccctggtcgggaacttgagtttgggatggttcctagtgggatgaagggagatgtcaatctaaatgtcaacatgggatccaactctcagatgatacctcagaagatgagagaggctggggcgggccctgaggagatgctgaaattacgcccaggtggctcagacatgctgcctgctcagcagaagatggtgccactgccatttggtgagcacccccagcaggagtatggcatgggccccagaccattccttcccatgtctcagggtccaggcagcaacagtggcttgcggaatctcagagaaccaattgggcccgaccagaggactaacagccggctcagtcatatgccaccactacctctcaacccttccagtaaccccaccagcctcaacacagctcctccagttcagcgcggcctggggcggaagcccttggatatatctgtggcaggcagccaggtgcattccccaggcattaaccctctgaagtctcccacgatgcaccaagtccagtcaccaatgctgggctcgccctcggggaacctcaagtccccccagactccatcgcagctggcaggcatgctggcgggcccagctgctgctgcttccattaagtccccccctgttttggggtctgctgctgcttcacctgtccacctcaagtctccatcacttcctgccccgtcacctggatggacctcttctccaaaacctccccttcagagtcctgggatccctccaaaccataaagcacccctcaccatggcctccccagccatgctgggaaatgtagagtcaggtggccccccacctcctacagccagccagcctgcctctgtgaatatccctggaagtcttccctctagtacaccttataccatgcctccagagccaaccctttcccagaacccactctctattatgatgtctcgaatgtccaagtttgcaatgcccagttccaccccgttataccatgatgctatcaagactgtggccagctcagatgacgactcccctccagctcgttctcccaacttgccatcaatgaataatatgccaggaatgggcattaatacacagaatcctcgaatttcaggtccaaaccccgtggttccgatgccaaccctcagcccaatgggaatgacccagccactttctcactccaatcagatgccctctccaaatgccgtgggacccaacatacctcctcatggggtcccaatggggcctggcttgatgtcacacaatcctatcatggggcatgggtcccaagagccaccgatggtacctcaaggacggatgggcttcccccagggcttccctccagtacagtctcccccacagcaggttccattccctcacaatggccccagtggggggcagggcagcttcccaggagggatgggtttcccaggagaaggcccccttggccgccccagcaacctgccccaaagttcagcagatgcagcactttgcaagcctggaggccccgggggtcctgactccttcactgtcctggggaacagcatgccttcggtgtttacagacccagatctgcaggaggtcatccgacctggagccaccggaatacctgagtttgatctatcccgcattattccatctgagaagcccagccagacgctgcaatatttccctcgaggggaagttccaggccgtaaacagccccagggtcctggacctgggttttcacacatgcaggggatgatgggcgaacaagcccccagaatgggactagcattacctggcatgggaggtccagggccagtgggaactccggacatccctcttggtacagctccatccatgccaggccacaaccccatgagaccaccagcctttctccaacaaggcatgatgggacctcaccatcggatgatgtcaccagcacaatctacaatgcccggccagcccaccctgatgagcaatccagctgctgccgtgggcatgattcctggcaaggatcgggggcctgccgggctctacacccaccctgggcctgtgggctctccaggcatgatgatgtccatgcagggcatgatgggacccaacagaacatcatgatccccccacagatgaggccccggggcatggctgctgacgtgggcatgggtggatttagccaaggacctggcaacccaggaaacatgatgttttaagctgctaagatgggatgtgccgatccttgtcaaaatgagattccaggtcctgagagctgctttgagggagttccaggagtacttactattggtcatgcaataggagaacagagacccgagggctgctttgggggaggggggaactcgagaatgtatggatttacctgaaaacaaattattcatttaatcaacaggtgtgttttttttaagatttattttttaaaaattatttttgtggacttgggtatcaatgatggcacctacttttgggaatctgtagctgtgctttgagaattgccatcggtcatgtgttgcaccgttctctgtatgtttacgtcctttggactggcttctcccaggattcttttctgtttttgtttttttgatttgggctttatttttttctgtgtactgtactatattgtaaaagggattttagcagagactttagtctttggggcaagaggagaacaggaatgctgggctgtttactttaggtggagaatccatcttcagacctttggactattttctttcaactgcagtgtatagaaaaaccaaactacgacctcagagcagagtattaatgaaaagcacaaaaaaaggaactaagttcagcgaggggtggggggaggggggagatttttcttttgaaaaataatgactcttaggacatttgtttttaagttcaagtgctcttcagcactgtcttgtctcccaatataccaacccactggcacattttctctgtttctctctccgattttgctctgtctcctcagttaagtgtttccttcctttgtgccccccgctggtgaccctctgcttccctctctctttccctttggcagctgcaatacacagtgttattttggggaaataaatctagcaaagcctcgccttccatgccgagcgtcctcttggctctgagagggaaagtctgtcctgggatgcttctctgtcttttttccccctaagtctttctctttcccatcatacccttccctgccccaccttgttttctgttccccttttattaggaattcccaagtgaattttattaatgtgggagtggaacagatgctaaaagctatccaggattttgtttctgtttgttttaaattttgtggttccttccctttcctccccctcccatgcgtaagacgttctgtgtaacctccattaaatttggtacaaaaccactcgccagagctgtggtgtcagaaaaataaaatatattgtttctta

SEQ ID NO: 302 - DNA, 446 bp, Homo sapiens
tttttccactcagctaagaggtatttattcagttgctggcacctctcccagtgtaaatctggacttggctccagagaaggtgtttcattacagcgggggcttagtttgcttcctgtagttagtagcgtttcatggttttctttatccagtgtacaaagcttgagactttggtgcaggctcgtggaggcatgccattgtttcgtccataggagacaatgccctgggccaccttgttacacacaagagggcctccagagtcccccttaaaggaagtctttttaatctctgggtcccccacgcacaactcaatggtactgtcgtaaaaatcgcgtaagtcagattcgcactttcgatcttcctgcactgtcatcttcacctcttgtagtgtggtgagtgtttcccaggtggcccgttgccccagccgccacactgatgtctgcctgctt

SEQ ID NO: 303 - DNA, 955 bp, Homo sapiens
ccaagagctaaaagagagtaagggggaaacaacagcagctccaaccagggcagccttcctgagaagatgcaaccaatcctgcttctgctggccttcctcctgctgcccagggcagatgcaggggagatcatcgggggacatgaggccaagccccactcccgcccctacatggcttatcttatgatctgggatcagaagtctctgaagaggtgcggtggcttcctgatacaagacgacttcgtgctgacagctgctcactgttggggaagctccataaatgtcaccttgggggcccacaatatcaaagaacaggagccgacccagcagtttatccctgtgaaaagacccatcccccatccagcctataatcctaagaacttctccaacgacatcatgctactgcagctggagagaaaggccaagcggaccagagctgtgcagcccctcaggctacctagcaacaaggcccaggtgaagccagggcagacatgcagtgtggccggctgggggcagacggcccccctgggaaaacactcacacacactacaagaggtgaagatgacagtgcaggaagatcgaaagtgcgaatctgacttacgccattattacgacagtaccattgagttgtgcgtgggggacccagagattaaaaagacttcctttaagggggactctggaggccctcttgtgtgtaacaaggtggcccagggcattgtctcctatggacgaaacaatggcatgcctccacgagcctgcaccaaagtctcaagctttgtacactggataaagaaaaccatgaaacgctactaactacaggaagcaaactaagcccccgctgtaatgaaacaccttctctggagccaagtccagatttacactgggagaggtgccagcaactgaataaatacctcttagctgagtggaaaaaaaaaaaaaaaaaaaaaaaaaaaaaaaa

SEQ ID NO: 304 - DNA, 443 bp, Homo sapiens
  modified_base (217)..(217): a, c, t or g
  modified_base (311)..(311): a, c, t or g
  modified_base (347)..(347): a, c, t or g
  modified_base (365)..(365): a, c, t or g
  modified_base (392)..(392): a, c, t or g
  modified_base (409)..(409): a, c, t or g
  modified_base (434)..(434): a, c, t or g
gtgagagagaagcctttaatgaaagatgagttgcaggcttggaccgctactcttgcgcccttggtgggggtgggggtggggtgggcaggggtggggttatggagagggataagtggggtgaggtggaagcagggggaagaggcaggtctgggagggtggagaggaaggacgctgcccaatgtggctgtctgctcaactgttctcccagaagaaattnttacaggccactgtgagagcagccacaagcaccacatactcctgggaagtccacctccccgtctccattctcgtctagctccttcatcaccttntccacagcatccacatccttctggggcatccagggnagccagagagctccgttntgcagcagctttttcagctcctttttngctcagctttgtaattntcccccttttttgcccgagttgggntggaacact

SEQ ID NO: 305 - DNA, 385 bp, Homo sapiens
  modified_base (15)..(15): a, c, t or g
  modified_base (38)..(38): a, c, t or g
  modified_base (141)..(142): a, c, t or g
ccagaacctgctccnacctcaggcccaggcaaccggtncactgctgcaatgggctctgagctggagacggcgatggagaccctcatcaacgtgttccacgcccactcggcaaagagggggacaagtacaagctgagcaagnnggagctgaaagagctgctgcagacggagctctctggcttcctggatgcccagaaggatgtggatgctgtggacaaggtgatgaaggagctagacgagaatggagacggggaggtggacttccaggagtatgtggtgcttgtggctgctctcacagtggcctgtaacaatttcttctgggagaacagttgagcagacagccacattgggcagcgtccttcctctccaccctcccagacctggcc

SEQ ID NO: 306 - DNA, 607 bp, Homo sapiens
ggactgttgaagacaggtctccacacacagctccagcagccacatttgcaaccttggccatctgtccagaacctgctcccacctcaggcccaggccaaccgtgcactgctgcaatgggctctgagctggagacggcgatggagaccctcatcaacgtgttccacgcccactcgggcaaagagggggacaagtacaagctgagcaagaaggagctgaaagagctgctgcagacggagctctctggcttcctggatgcccagaaggatgtggatgctgtggacaaggtgatgaaggagctagacgagaatggagacggggaggtggacttccaggagtatgtggtgcttgtggctgctctcacagtggcctgtaacaatttcttctgggagaacagttgagcagacagccacattgggcagcgcccttcctctccaccctcccagacctgcctcttccccctgcttccacctcaccccacttatccctctccataaccccacccttgcccaccccacccccacccccaccaagggcgcaagagtagcggtccaagcctgcaactcatctttcattaaaggcttctctctcaccagcaaaaaaaaaaaaa

SEQ ID NO: 307 - DNA, 209 bp, Homo sapiens
  modified_base (1)..(1): a, c, t or g
  modified_base (15)..(15): a, c, t or g
  modified_base (21)..(21): a, c, t or g
  modified_base (187)..(187): a, c, t or g
nttccagtttttaantgaatnatttatttaacaagtttcacttagtacaatacatctaaatggaaatcacaatacaaggaaagatttaaaccaaagcctcagattttcatacaaacgacacgaccaaacttctaaagtattggtattacatcttaaaattgtcccgtatccttaaaaaaaaaaaaangtgtacactcacgtgccttaca

SEQ ID NO: 308 - DNA, 248 bp, Homo sapiens
  modified_base (151)..(151): a, c, t or g
  modified_base (185)..(185): a, c, t or g
gttcttctcacctcttaatcccatgagagtacatattgaaattggacccgatggcagagttaccggtgaggcagatgttgaatttgctactcatgaagatgctgtggcagctatggcaaaagacaaagctaatatgcaacacagatatgtngagctcttcttaaattctactgcaggaacaagtnggggtgcttacgatcacagctatgtaggaactttttttgaattctacagcaggggcaagttgg

SEQ ID NO: 309 - DNA, 2220 bp, Homo sapiens
ggaaaattacccggtatcgttagagctacaccaaaattgcattgagccaaacttgccaccaagagcccaacaatcaccatgatgctgagcacggaaggcagggaggggttcgtggtgaaggtcaggggcctaccctggtcctgctcagccgatgaagtgatgcgcttcttctctgattgcaagatccaaaatggcacatcaggtattcgtttcatctacaccagagaaggcagaccaagtggtgaagcatttgttgaacttgaatctgaagaggaagtgaaattggctttgaagaaggacagagaaaccatgggacacagatacgttgaagtattcaagtctaacagtgttgaaatggattgggtgttgaagcatacaggtccgaatagccctgatactgccaacgatggcttcgtccggcttagaggactcccatttggctgtagcaaggaagagattgttcagttcttttcagggttggaaattgtgccaaatgggatgacactgccagtggactttcaggggcgaagcacaggggaagcctttgtgcagtttgcttcacaggagatagctgagaaggccttaaagaaacacaaggaaagaatagggcacaggtacattgagatcttcaagagtagccgagctgaagttcgaacccactatgatccccctcgaaagctcatggctatgcagcggccaggtccctatgataggccgggggctggcagagggtataatagcattggcagaggagctgggtttgaaaggatgaggcgtggtgcctatggtggagggtatggaggctatgatgactatggtggctataatgatggatatggctttgggtctgatagatttggaagagacctcaattactgtttttcaggaatgtctgatcatagatacggagatggtgggtccagtttccagagcaccacagggcactgtgtacacatgagggggttaccttacagagccactgagaatgatatttataatttcttctcacctcttaatcccatgagagtacatattgaaattggacccgatggcagagttaccggtgaggcagatgttgaatttgctactcatgaagatgctgtggcagctatggcaaaagacaaagctaatatgcaacacagatatgtggagctcttcttaaattctactgcaggaacaagtgggggtgcttacgatcacagctatgtagaactttttttgaattctacagcaggggcaagtggtggcgcttatggtagccaaatgatgggagggatgggcttatccaaccagtctagttatggaggtcctgctagccagcagctgagtggtggttatggaggtggttatggtggtcagagcagtatgagtggatatgaccaagttctgcaggaaaactccagtgactatcagtcaaaccttgcttaggtagagaaggagcactaaatagctactccagatataaaagctgtacatttgtgggagttgaatagaatgggagggatgtttagtatatccagtatgattggtaaatgggaaatataattgattctgatcactcttggtcagcttctctttctttatctttctttctccttttttaagaaaacgagttaagtttaacagttttgcattacaggcttgtgattcatgcttactgtaaagtggaagttgagattattttaaaacttcaagctcagtaattttgaacactgaaacattcatctaggacataataacaaagttcagtattgaccataactgttaaaacaatttttagctttcctcaagttagttatgttgtaggagtgtacctaagcagtaagcgtatttaggttaatgcagtttcacttatgttaaatgttgctcttataccacaaatacattgaaaacttcggatgcatgttgagaaacatgcctttctgtaaaactcaaatataggagctgtgtctacgattcaaagtgaaaacatttggcatgtttgttaattctagctttttggtttaatatcctgtaaggcacgtgagtgtacactttttttttttttaaggatacgggacaattttaagatgtaataccaatactttagaagtttggtcgtgtcgtttgtatgaaaatctgaggctttggtttaaatctttccttgtattgtgatttccatttagatgtattgtactaagtgaaacttgttaaataaatcttccttttaaaaactggaaa

SEQ ID NO: 310 - DNA, 531 bp, Homo sapiens
  modified_base (22)..(22): a, c, t or g
  modified_base (58)..(58): a, c, t or g
  modified_base (67)..(67): a, c, t or g
  modified_base (79)..(80): a, c, t or g
  modified_base (491)..(491): a, c, t or g
tttttagttaaagaaaaacagnctttgctccaagggccgacaaagtgaactgaaggtncagaaaggnaagactgggtgnnggtttcctgcaagactcttgctccaaaacctgggaagtgaggagagggcgctccgagactctggggaaggttggtgcacacaggggttcccttggtgggggagaagagccgccagcccacacacggtcactgggattggtgtgagtgggttccaagcgactgccatgtgctagtccactgacatgattgacattaacattcttggggggcattaaattaaggaatgacacagggagccaagagagtggcttattcggttggattctgaatcacaatcaggaaatagtctttatctggtgcaaccataatttcatttttcttggagcgaattcgaaggaaggtgagatcgttctgggggcgatgtcacgcacggtctccgcccttcaggatgaagctgtcatgaggctgcancttggtggtgtgggtttccatggtcccttatgggatcctt

SEQ ID NO: 311 - DNA, 480 bp, Homo sapiens
  modified_base (3)..(3): a, c, t or g
  modified_base (8)..(8): a, c, t or g
  modified_base (18)..(18): a, c, t or g
  modified_base (24)..(24): a, c, t or g
  modified_base (35)..(35): a, c, t or g
  modified_base (40)..(40): a, c, t or g
  modified_base (48)..(48): a, c, t or g
  modified_base (71)..(71): a, c, t or g
  modified_base (101)..(101): a, c, t or g
  modified_base (153)..(153): a, c, t or g
  modified_base (156)..(156): a, c, t or g
  modified_base (371)..(371): a, c, t or g
  modified_base (385)..(385): a, c, t or g
  modified_base (403)..(403): a, c, t or g
  modified_base (414)..(414): a, c, t or g
  modified_base (430)..(430): a, c, t or g
agnccagnaagggagtgncagggnaatgcatcgtncgtgnaacacagnaagggcatttcccatcaaggagncaccatgggacaaccccaccaccacccagntatgccagcctcatgcacagcttcatcctgaagggcacggagcaccgtgcgntgnacatcgacccccaggaacgatcttcaccttccttcgaattcgctccaagaaaaatgaaattatggttgcaccagataaagactatttcctgattgtgattcagaatccaaccgaataagccactctcttgggctccctgtgtcattccttaatttaatgccccccaagaatgttaatgtcaatcatgtcagtggactagcacatggcagtcgttngaacccacttacancaatccagtgaccgtgtntgggcttgcgnttttttccccaccaangggacccctgtttgaccaacttcccagaggttcgggggcctttttatttt

SEQ ID NO: 312 - DNA, 1526 bp, Homo sapiens
cgcagaaaggcacaggactcgctaagtgttcgctacgcggggctaccggatcggtcggaaatggcagaggtggaggagacactgaagcgactgcagagccagaagggagtgcagggaatcatcgtcgtgaacacagaaggaggctgggagcccttgggacactgtggagacaggagcaggccccctgctcagggctgcccctgatcagttgggtggcctgaggcaactcctttccccgcttcagccctcaactgcctcgagtcctgtgatggtccagggaatctcttttgggcacttcttgctctaagacctgaaagacttttgtcactaagagagaaactgtcttctgggactggacattttgactccaaggagacaaccccaggggccaacagccccagctgtgacccccaggcttccacatgaactcacaaaggagaggccctcattcttgccttaaaactgcccctaaagccaagccttttcactgggaagccctagctgcttaccttttggatactagtgagtgctgcttttttgtatactcatggggctgattgcaccatagctgagaacgtggaatgcagaatgagcccacctggctttgaatctgggccctacttaacttatcagctatgtggttttgggcataagccactttctctgttaagttttctcatttgtaaaatgtgggtcataattctgccttcctctaggggaagcttttagaatagtgcctggcatgaaatgcctatgaatgtctcagttagtgtgtgtgtgtctttaacttgcgtcccattctcagggcccccacatcagtgtctcgtttacatctcacacagtgaccctgcgaggcaagggtttgcccagtttgcagatgagaaacccaaagctgagagaggtgtggggaaccgcccaaggtcacccagctgtgaatgaacgtggtcagaacacagaatctgagttggtcacacttcccactgatccatggggcctttaagccctctggaagcttccattaaagatgattatttgaggataattgtattgggatgcctatgatcttatctagggttttcctacccatccccaacattcagctcagctgcctctttcttgaggacaccctcactgatcaccccagcccagccagagtggttgctcctgctcctgcccctgaacctatgacatacccaagtcccaatactttcgagccatctgccactgccttttgacatctctgccttggctagattcaaatggtgtttcataataaaagtctgagtttaagcagctttaccgaaaacgcaagggaagtttcattccatttatacttctccagaccccctgccatcctctgctgctacccacacaggcagaataaaaggcttaaatgtgtaagtcccatgaaggcaaagattggtctcttgtgttcactgctgtctgtagtacttaggatggtgttggcccagagttggtgtttgattaaagtatctgttgaattttttaaaaaaaaaaaaaaaaaa

SEQ ID NO: 313 - DNA, 464 bp, Homo sapiens
  modified_base (11)..(12): a, c, t or g
  modified_base (15)..(15): a, c, t or g
  modified_base (424)..(424): a, c, t or g
  modified_base (433)..(433): a, c, t or g
  modified_base (449)..(449): a, c, t or g
cctgcaattcnngcnattctttatcctcctcctcttcctctttttcactgtcttcatcctcttcccttgtcaaactctctctctcgtccgagtcgccctgtgagggagacgccctggcacccacgtgctcattcgagaggatttcaggccctgcctcttcctgctctgtgctgtcacgttcttccgcttctctcttacagtaggagtagcgatgattcatgtgttgagaataagacccagagtgtgagaagcgctttccacatttgtcacattgatagggcttttctccagaatgtaatcgcatgtgttcaatcaaatgatgtttgtgtttaaatgcctttttacagattccacactcatgagggtcttttaacccgtggtggttcaaaatttatggtctcaataaatggaaccaactcttttngggaataancttgtcaacaacaaantccacaaaggcatta

SEQ ID NO: 314 - DNA, 493 bp, Homo sapiens
  modified_base (317)..(317): a, c, t or g
  modified_base (333)..(333): a, c, t or g
  modified_base (454)..(454): a, c, t or g
  modified_base (493)..(493): a, c, t or g
aagagccacaagtagaacctcttgatctttcactaccaaagcaacagggagaattattagaaaggtcaactatcactagtgtttaccagaacagtgtttattctgtccaggaagaacccttgaacttgtcttgcgcaaaaaaggagccacaaaaggacagttgtgttacagactcagaaccagttgtaaatgtaatcccaccaagtgccaaccccataaatatcgctatacctacagtcactgcccagttacccacaatcgtggccattgctgaccagaacagtgttccatgcttaagagcgctagtggcccaattnaggcaaacggttctgnttccccagggtggcattacaccttacttcaacttacgggttcaggccctggcagttccaaggaacccaccctttggaaagttgattcccggccaaatggggaattcaggggttgaaaaggnccaagggttacttggcttcaggaagggggggttatttan

SEQ ID NO: 315 - DNA, 3952 bp, Homo sapiens
attttagacacaagcgagaggatcatggcggatggccccaggtgtaagcgcagaaagcaggcgaacccgcggcgcaataacgttacaaattataatactgtggtagaaacaaattcagattcagatgatgaagacaaactgcatattgtggaagaagaaagtgttacagatgcagctgactgtgaaggtgtaccagaggatgacctgccaacagaccagacagtgttaccagggaggagcagtgaaagagaagggaatgctaagaactgctgggaggatgacagaaaggaagggcaagaaatcctggggcctgaagctcaggcagatgaagcaggatgtacagtaaaagatgatgaatgcgagtcagatgcagaaaatgagcaaaaccatgatcctaatgttgaagagtttctacaacaacaagacactgctgtcatttttcctgaggcacctgaagaggaccagaggcagggcacaccagaagccagtggtcatgatgaaaatggaacaccagatgcattttcacaattactcacctgtccatattgtgatagaggctataaacgctttacctctctgaaagaacacattaaatatcgtcatgaaaagaatgaagataactttagttgctccctgtgcagttacacctttgcatacagaacccaacttgaacgtcacatgacatcacataaatcaggaagagatcaaagacatgtgacgcagtctgggtgtaatcgtaaattcaaatgcactgagtgtggaaaagctttcaaatacaaacatcacctaaaagagcacttaagaattcacagtggagagaagccatatgaatgcccaaactgcaagaaacgcttttcccattctggctcctatagctcacacataagcagtaagaaatgtatcagcttgatacctgtgaatgggcgaccaagaacaggactcaagacatctcagtgttcttcaccgtctctttcagcatcaccaggcagtcccacacgaccacagatacggcaaaagatagagaataaaccccttcaagaacaactttctgttaaccaaattaaaactgaacctgtggattatgaattcaaacccatagtggttgcttcaggaatcaactgttcaacccctttacaaaatggggttttcactggtggtggcccattacaggcaaccagttctcctcagggcatggtgcaagctgttgttctgccaacagttggtttggtgtctcccataagtatcaatttaagtgatattcagaatgtacttaaagtggcgatagatggtaatgtaataaggcaagtgttggagaataatcaagccaatcttgcatccaaagaacaagaaacaatcaatgcttcacccatacaacaaggtggccattctgttatttcagccatcagtcttcctttggttgatcaagatggaacaaccaaaattatcatcaactacagtcttgagcagcctagccaacttcaagttgttcctcaaaatttaaaaaaagaaaatccagtcgctacaaacagttgtaaaagtgaaaagttaccagaagatcttactgttaagtctgagaaggacaaaagctttgaagggggggtgaatgatagcacttgtcttctgtgtgatgattgtccaggagatattaatgcacttccagaattaaagcactatgacctaaagcagcctactcagcctcctccactccctgcagcagaagctgagaagcctgagtcctctgtttcatcagctactggagatggcaatttgtctcctagtcagccacctttaaagaacctcttgtctctcctaaaagcatattatgctttgaatgcacaaccaagtgcagaagagctctcaaaaattgctgattcagtaaacctaccactggatgtagtaaaaaagtggtttgaaaagatgcaagctggacagatttcagtgcagtcttctgaaccatcttctcctgaaccaggcaaagtaaatacccctgccaagaacaatgatcagcctcaatctgcaaatgcaaatgaaccccaggacagcacagtaaatctacaaagtcctttgaagatgactaactccccagttttaccagtgggatcaaccaccaatggttccagaagtagtacaccatccccatcacctctaaacctttcctcatccagaaatacacagggttacttgtacacagctgagggtgcacaagaagagccacaagtagaacctcttgatctttcactaccaaagcaacagggagaattattagaaaggtcaactatcactagtgtttaccagaacagtgtttattctgtccaggaagaacccttgaacttgtcttgcgcaaaaaaggagccacaaaaggacagttgtgttacagactcagaaccagttgtaaatgtaatcccaccaagtgccaaccccataaatatcgctatacctacagtcactgcccagttacccacaatcgtggccattgctgaccagaacagtgttccatgcttaagagcgctagctgccaataagcaaacgattctgattccccaggtggcatacacctactcaactacggtcagccctgcagtccaagaaccacccttgaaagtgatccagccaaatggaaatcaggatgaaagacaagatactagctcagaaggagtatcaaatgtagaggatcagaatgactctgattctacaccgcccaaaaagaaaatgcggaagacagaaaatggaatgtatgcttgtgatttgtgtgacaagatattccaaaagagtagttcattattgagacataaatatgaacacacaggtaaaagacctcatgagtgtggaatctgtaaaaaggcatttaaacacaaacatcatttgattgaacacatgcgattacattctggagaaaagccctatcaatgtgacaaatgtggaaagcgcttctcacactctgggtcttattctcaacacatgaatcatcgctactcctactgtaagagagaagcggaagaacgtgacagcacagagcaggaagaggcagggcctgaaatcctctcgaatgagcacgtgggtgccagggcgtctccctcacagggcgactcggacgagagagagagtttgacaagggaagaggatgaagacagtgaaaaagaggaagaggaggaggataaagagatggaagaattgcaggaagaaaaagaatgtgaaaaaccacaaggggatgaggaagaggaggaggaggaggaagaagtggaagaagaagaggtagaagaggcagagaatgagggagaagaagcaaaaactgaaggtctgatgaaggatgacagggctgaaagtcaagcaagcagcttaggacaaaaagtaggcgagagtagtgagcaagtgtctgaagaaaagacaaatgaagcctaatcgtttttctagaaggaaaataaattctaattgataatgaatttcgttcaatattatccttgcttttcatggaaacacagtaacctgtatgctgtgattcctgttcactactgtgtaaagtaaaaactaaaaaaatacaaaatacaaaacacacacacacacacacacacacacacacacacacacacacacaaaataaatccgggtgtgcctgaacctcagacctagtaatttttcatgcagttttcaaagttaggaacaagtttgtaacatgcagcagattagaaaaccttaatgactcagagagcaacaatacaagaggttaaaggaagctgattaattagatatgcatctggcattgttttatcttatcagtattatcactcttatgttggtttattcttaagctgtacaattgggagaaattttataattttttattggtaaacatatgctaaatccgcttcagtattttattatgttttttaaaatgtgagaacttctgcactacaaaattcccttcacagagaagtataatgtagttccggaattc

SEQ ID NO: 316 - DNA, 437 bp, Homo sapiens
  modified_base (416)..(416): a, c, t or g
acaaagcagatatttatttagtaatgtgctagaaatccagagacacaatgggttttctaggaaacaaaccaccagtgtacaaaaccgtacagcattgctcccgtgatccgtacaaaatgattgtccgcatggtggagtaaggctggggctgtgggaggggaagcgaggagctgaggaggggcacagttctattgccaccaccaccaggctgtgccctggccgccagtgggtgccacttgggtgcactcaactatgacatcaaggatgagagggcatctgagctagatcacatcccagggcccacagagctcacagcctgtggggggacccaactccctgctgggtggggccagggcataaacctgggggatagctgttccctaaaccttcaatgacaaggggcacccaccctgggntggatttcccttttgtttgac

SEQ ID NO: 317 - DNA, 320 bp, Homo sapiens
  modified_base (285)..(285): a, c, t or g
  modified_base (300)..(300): a, c, t or g
gagcgagttaatgtgtccatctgcccaaccctgtcctgagaaaggacctggttttggccaggacctgacaaatacccaatggcagcagtgtcaacagacgggagtccagccagggtgggtgcccttgtcattgaggttagggacagctatccccaggttatgcctggccccacccagcagggagttggggtccccccacaggctgtgagctctgtgggccctgggatgtgatctagctcagatgccctcttcatccttgatgtcatagttgagtgcacccaagtnggcacccacttggcngccaggggcaacagcctggg

SEQ ID NO: 318 - DNA, 2810 bp, Homo sapiens
gagctggcgcagtgccctggtggcagtggctgaagtggcggcggcttcggcggctgcggcgtctgcaacagcttcgggctcggggttttggcggcggcgccggcgggctaggctgcgcggtgcggaccccggcgcgcggtccgggttgctggggcggcgcgtaagatgcctctaatggaggagtttctgagcagcacccctggcccagtggctttgaaagggagctcaaaccagagactatttcaagccctggatatcatatcctgagggccacaggagaagagaacatggctgtgagtttggatgacgacgtgccgctcatcctgaccttggatgagggtggcagtgccccactggctccctccaacggcctgggccaagaagagctacctagcaaaaatggcggcagctatgccatccacgactcccaggcccccagtctcagctctgggggtgagagttccccctccagccccgcacacaactgggagatgaattaccaagaggcagcaatctacctccaggaaggcgagaacaacgacaagttcttcacccaccccaaggatgccaaggcgctggcggcctacctctttgcacacaatcacctcttctacctgatggagctggccacggccctgctgctgctgctgctctccctgtgcgaggcccccgccgtccccgcactccggcttggcatctatgtccacgccaccctggagctgtttgccctgatggtggtagtgtttgaactctgcatgaagttacgctggctgggcctccacaccttcatccggcacaagcggaccatggtcaagacctcggtgctggtggtgcagtttgtcgaggccatcgtggtgttggtacggcagatgtcccatgtgcgggtgacccgagcactgcgctgcattttcctggtggactgtcggtattgcggtggcgtccggcgcaacctgcggcagatcttccagtccctgccgcccttcatggacatcctcctgctgctgctgttcttcatgatcatctttgccatcctcggtttctacttgttctcccctaacccttcagacccctacttcagcaccctggagaacagcatcgtcagtctgtttgtccttctgaccacagccaatttcccagatgtgatgatgccctcctactcccggaacccctggtcctgcgtcttcttcatcgtgtacctctccatcgagctgtatttcatcatgaacctgcttctggctgtggtgttcgacaccttcaatgacattgagaaacgcaagttcaagtctttgctactgcacaagcgaaccgctatccagcatgcctaccgcctgctcatcagccagaggaggcctgccggcatctcctacaggcagtttgaaggcctcatgcgcttctacaagccccggatgagtgccagggagcgctatcttaccttcaaggccctgaatcagaacaacacacccctgctcagcctaaaggacttttacgatatctacgaagttgctgctttgaagtggaaggccaagaaaaacagagagcactggtttgatgagcttcccaggacggcgctcctcatcttcaaaggtattaatatccttgtgaagtccaaggccttccagtatttcatgtacttggtggtggcagtcaacggggtctggatcctcgtggagacatttatgctgaaaggtgggaacttcttctccaagcacgtgccctggagttacctcgtctttctaactatctatggggtggagctgttcctgaaggttgccggcctgggccctgtggagtacttgtcttccggatggaacttgtttgacttctccgtgacagtgttcgccttcctgggactgctggcgctggccctcaacatggagcccttctatttcatcgtggtcctgcgccccctccagctgctgaggttgtttaagttgaaggagcgctaccgcaacgtgctggacaccatgttcgagctgctgccccggatggccagcctgggcctcaccctgctcatcttttactactccttcgccatcgtgggcatggagttcttctgcgggatcgtcttccccaactgctgcaacacgagtacagtggcagatgcctaccgctggcgcaaccacaccgtgggcaacaggaccgtggtggaggaaggctactattatctcaataattttgacaacatcctcaacagctttgtgaccctgtttgagctcacagttgtcaacaactggtacatcatcatggaaggcgtcacctctcagacctcccactggagccgcctctacttcatgaccttttacattgtgaccatggtggtgatgacgatcattgtcgcctttatcctcgaggccttcgtcttccgaatgaactacagccgcaagaaccaggactcggaagttgatggtggcatcacccttgagaaggaaatctccaaagaagagctggttgccgtcctggagctctaccgggaggcacggggggcctcctcggatgtcaccaggctgctggagaccctctcccagatggagagataccagcaacattccatggtgtttctgggacggcgatcaaggaccaagagcgacctgagcctgaagatgtaccaggaggagatccaggagtggtatgaggagcatgccagggagcaagagcagcagcgacaactcagcagcagtgcagcccccgccgcccagcagcccccaggcagccgccagcgctcccagaccgttacctagcccagcgcccgaaagccgtctcttctatgcaataacacaatagtattactctaaaaaaaaaaaaaaaaaaaa

SEQ ID NO: 319 - DNA, 382 bp, Homo sapiens
  modified_base (233)..(233): a, c, t or g
  modified_base (303)..(303): a, c, t or g
  modified_base (322)..(322): a, c, t or g
ttatttaattctcagcagatttgaaggaacatatcagggaatccaaagcaccagtgcagaatcccacagctcagggaacctgggccaagggggctttttgatagacggaagcagtaggaggaggcagctgggaatgaggatgggggaagactacagcagtgtgtgactgtggtctacaacaggcacgaacctcaaaaatagcattcaacatgaaagcaaccagacacaaaagntcacatattatgcctgtaatatcagcactttgggaacactgaggtggggtggatcacctgaggccagggngctcaccaccagcctgggnccaacatgtccctacttaaaactacaaggaaaattaggccggggattggtagttacatgc

SEQ ID NO: 320 - DNA, 431 bp, Homo sapiens
  modified_base (408)..(408): a, c, t or g
ctggtttttgtcactatggacttaccaattctgaatatttcccataaacagaatcatacaatatttgattttttttttttttgaaactaagccttgctctgtctcccaggctggagtgctatggtgcaatttttgttcactgcaacctctgccttccaagatcaagagattctccagtctcagctcccaagtagctgggattacaggcatgtactaccatgcctgggctaattttcttgtagttttagtaggggacatgttggccagggctggtgggtgagctcctgggcctcagggtgatccacccacctcagtgttccaaagtgctgatattacagggcataatatgtgatcttttgtgtctgggttgctttcatgttgaatgctaatttttgagggttcgtgccngttgtaggacccacagttcacac

SEQ ID NO: 321 - DNA, 387 bp, Homo sapiens
  modified_base (153)..(153): a, c, t or g
  modified_base (170)..(170): a, c, t or g
  modified_base (266)..(266): a, c, t or g
  modified_base (373)..(373): a, c, t or g
aagtgatattgcagagggtctgggggctgtacatgggcaggggcttggtgagctttgtacatggggctgggagacaagggagcctccaggtggaagggtattttttaataaaaaaaataatggagctacaaccaccccctcccccctccccgnttaaaaagacacaaaantagacgtctctgaggtaaacggggagcctggggcttaagggtgtttaaagggcttcacaggtgccagagcttagaggtgtcacaggcaccggggtngctcctgcatcagttggtagaacagcacgtagccctcgctggatgccacctgggttttcactgacaggggagacacgagagtcattgtagacatgccaaccagtctngcaccggcacaggg

SEQ ID NO: 322 - DNA, 446 bp, Homo sapiens
  modified_base (393)..(393): a, c, t or g
  modified_base (413)..(413): a, c, t or g
  modified_base (431)..(431): a, c, t or g
  modified_base (441)..(441): a, c, t or g
agattccctcgaatcctcgtgctccatctgaatcgattttctgcctcccgaggctccatcaaaaaaagttcagtaggtgtagactttccactgcagcgactgagcctaggggactttgccagtgacaaagccggaagtcctgtataccagctgtatgccctttgcaaccactcaggcagcgtccactatggccactacacagccctgtgccggtgccagactggttggcatgtctacaatgactctcgtgtctcccctgtcagtgaaaaccagggtgggcatccagcgagggctacgtgctgttctaccaactgatgcaggagccaccccggtgcctgtgacacctctaaggtttgggcacctgtgaaggcccttttaaacaccctttaaggncccagggttccccgttttancttcaggaggaggtttantttttgtgtnttttt

SEQ ID NO: 323 - DNA, 2344 bp, Homo sapiens
ggtgaagccggtggccggtggccgggcgggaccaacaaagatggcggcggcccctgcggcgggagcgatctgggcaacggctgcggctaaagctgcagccgggcccacgggggggctgcacgggggtagtagggggtggccctgaactggggcctggccctggctggcctctcccgccgcctcactgggggacaggtactggggatacgatggctgattcgatagatctggttcctgccctcagtgcgtatactgctccccactttcgttgatgtggtagtggtgatgactgagccaaccacctaatgtggaaatgagaggacagcaagattgtgggtccagcctgtggtgtccacaatgccccaggcctctgagcaccgcctgggccgtacccgagagccacctgttaatatccagccccgagtgggatccaagctaccatttgcccccagggcccgcagcaaggagcgcagaaacccagcctctgggccaaaccccatgttacgacctctgcctccccggccaggtctgcctgatgaacggctcaagaaactggagctgggacggggacggacctcaggccctcgtcccagaggcccccttcgagcagatcatggggttcccctgcctggctcaccacccccaacagtggctttgcctctcccatctcggaccaacttagcccgttccaagtctgtgagcagtggggacttgcgtccaatggggattgccttgggagggcaccgtggcaccggagagcttggggctgcactgagccgcttggccctccggcctgagccacccactttgagacgtagcacttctctccgccgcctagggggctttcctggaccccctaccctgttcagcatacggacagagccccctgcttcccatggctccttccacatgatatccgcccggtcctctgagcctttctactctgatgacaagatggctcatcacacactccttctgggctctggtcatgttggccttcgaaacctgggaaacacgtgcttcctgaatgctgtgctgcagtgtctgagcagcactcgacctcttcgggacttctgtctgagaagggacttccggcaagaggtgcctggaggaggccgagcccaagagctcactgaagcctttgcagatgtgattggtgccctctggcaccctgactcctgcgaagctgtgaatcctactcgattccgagctgtcttccagaaatatgttccctccttctctggatacagccagcaggatgcccaagagttcctgaagctcctcatggagcggctacaccttgaaatcaaccgccgaggccgccgggctccaccgatacttgccaatggtccagttccctctccaccccgccgaggaggggctctgctagaagaacctgagttaagtgatgatgaccgagccaacctaatgtggaaacgttacctggagcgagaggacagcaagattgtggacctgtttgtgggccagttgaaaagttgtctcaagtgccaggcctgtgggtatcgctccacgaccttcgaggttttttgtgacctgtccctgcccatccccaagaaaggatttgctgggggcaaggtgtctctgcgggattgtttcaaccttttcactaaggaagaagagctagagtcggagaatgccccagtgtgtgaccgatgtcggcagaaaactcgaagtaccaaaaagttgacagtacaaagattccctcgaatcctcgtgctccatctgaatcgattttctgcctcccgaggctccatcaaaaaaagttcagtaggtgtagactttccactgcagcgactgagcctaggggactttgccagtgacaaagccggaagtcctgtataccagctgtatgccctttgcaaccactcaggcagcgtccactatggccactacacagccctgtgccggtgccagactggttggcatgtctacaatgactctcgtgtctcccctgtcagtgaaaaccaggtggcatccagcgagggctacgtgctgttctaccaactgatgcaggagccaccccggtgcctgtgacacctctaagctctggcacctgtgaagccctttaaacacccttaagccccaggctccccgtttacctcagagacgtctatttttgtgtctttttaatcggggaggggggagggggtggttgtagctccattattttttttattaaaaaatacccttccacctggaggctcccttgtctcccagccccatgtacaaagctcaccaagcccctgcccatgtacagcccccagaccctctgcaatatcactttttgtgaataaatttattaagaaaaaaaaaaaaaaaaaaa

SEQ ID NO: 324 - DNA, 440 bp, Homo sapiens
taggatcttaaaaaaccatttaataaaaaaaaatctttgaagggacaaatgggaagttttcacttagagtttgatttacaagacaataggaggaatcagatttgggaacacaacaggcttgaacactttctggagactgagagacagttcagagtcagccctcaccgttagccagacccctggccaggacccgcagcaggctggtccagcgggtctgtggggcactcctgtggggcactcttggtggaaacgatgagccaggtgatggtctccccaggagtgggcaatgggtgaggcctgagccctgaactggctggcttttggacagtccttgaaaatgtggctgctccagaagccactcaagctggaccatggtcacagttaacctcaggcccaacattaaacaaaaatgtactgagtgctcagtcactagagatgat

SEQ ID NO: 325 - DNA, 3159 bp, Homo sapiens
attcaaaaatcactcctcaaaaacgacatacccaggcaggagaaggtacctctcttgaaacgaagacaccaagaactcctaagaggcaaggtactcagccgcctgggtttttgccaaactgtacttggccacattcagtgaattccagtccagaaagcccctcctgtccagcccctccaacttcatcgactgcccagcccaggagagagtgtctcactcccatcagagaccctctcagaacacctccgagagcagcagccttcatgggcacgcctcagaatcaaacacaccaacagccccatgtcctcagagctgctcgggcagaggaaccagcccagaaactaaaggataaagctatcaaaactccaaaaagaccagggaattcaactgtgacttcttccccacctgttacgccaaagaaactgtttacctctcctttatgtgatgtctccaagaagagtccatttaggaaatctaaaatagagtgtccttccccaggagaactggatcagaaagagccccagatgtcacccagcgtagctgcatctctctcctgccctgttccctcaactccccctgaactctcacagagagctacattggacaccgtccctcctccacccccttctaaagttgggaaacggtgtagaaagacctctgatcccagaaggagcatcgtggagtgtcagcctgatgcctccgctactcctggggttggcacagctgacagcccagctgcccccacagactctagagatgaccagaagggaccgagcctctctcctcagtctcctcctgaaagacggggctacccaggccctggtctcaggagtgattggcatgcatcctctcctctgctcattacaagtgacacagagcatgtcactctcctcagtgaagccgaacaccatggcattggtgacttgaaaagtaacgtcttatcagtggaagagggtgaggggctaaggacagcagatgctgagaagtcttctctgtctcaccctgggattcccccatctcctccttcctgtgggcctggctctcctctgatgccttcctgtgacgtgcactgtaccacagatgggagacagtgccaggcttcggcacaactagacaacctgccagcatcagcttggcattccacagactctgccagcccacagacctatgaggttgagctggagatgcaagcttctggccttcccaaacttcgaattaagaagatagaccccagctcttcattagaggctgagcccctcagcaaggaggagagctctctgggagaagagagcttcctccctgctctcagcatgcccagggccagcaggtccttaagcaaacctgaacccacctatgtgtcacccccctgcccccgcctctcccacagcacacctggcaagagcagggggcaaacctacatctgccaggcctgtacccccacccacggcccttctagtaccccctctccatttcaaacagatggggttcctcggacaccatcccccaagcacagtgggaagacaactccagacataattaaagactggcccaggaggaagagggcggtgggctgtggcgccggctcctcttccgggaggggcgaggtcggtgcagaccttcctgggagcctgtcactgcttgagacagagggcaaggaccacggccttgaactcagcatccacaggacgcccatcttggaggattttgagctcgagggagtgtgccagctcccagaccagtcgcctcccaggaacagcatgcctaaggccgaggaagcctcttcctggggacagtttgggttgagttccaggaagagagtcctgttggccaaggaagaagctgaccgtggagccaaaaggatctgtgacctgagagaagattcagaagttagtaagagtaaagaggggtctccaagttggagtgcatggcagctaccctccacgggagacgaagaggtgtttgtttccggctccaccccacctcccagctgtgccgtgcggagctgcctctctgccagtgccctccaggctctgacccagtctccgctgctgttccaggggaaaacaccttcctctcagagcaaagaccccagagatgaggatgtggatgttcttccctccactgtagaagactctcctttcagttgcgctttctccaggaggcgccccatcagcagaacttatacacggaagaagctcatgggaacctggctggaggacttatagccacaaacattactgagcccaaaagatcaaggagtcagccaggaccctgtggacataaagaagttggatgcctggtcccaagcctcttttgccatggtcagtgttcagattgccattagaatgccttagggttttctaattccccttatggatccaatccatctcctggccctgccccttgttggggaagttgcaggaggagaggtggatggcaatgtgattggtgctataactcaggcagcctgggagtcaggaacccagacaaggaatcccattccagcctcaccccaaccatgaccttggcaagtcagggggccactctgcctcatttatgcaaatggagaaaggcgccctccctggggtcccttgagctgctgtaaggctgggctgctgcgacacaggcagcgctttgtaaactgtgaagccatatacgtgaaactgaagagtgcattgggcagtggaagctattttttgccttccctgtgtaacagtaaaatcatctctagtgactgagcactcagtacatttttgtttaatgttgggcctgaggttaactgtgaccatggtccagcttgagtggcttctggagcagccacattttcaaggactgtccaaaagccagccagttcagggctcaggcctcacccattgcccactcctggggagaccatcacctggctcatcgtttccaccaagagtgccccacaggagtgccccacagacccgctggaccagcctgctgcgggtcctggccaggggtctggctaacggtgagggctgactctgaactgtctctcagtctccagaaagtgttcaagcctgttgtgttcccaaatctgattcctcctattgtcttgtaaatcaaactctaagtgaaaacttcccatttgtcccttcaaagattttttttttattaaatggttttttaagatcc

SEQ ID NO: 326 - DNA, 1412 bp, Homo sapiens
  modified_base (748)..(784): a, c, t or g
  modified_base (797)..(797): a, c, t or g
  modified_base (801)..(802): a, c, t or g
  modified_base (812)..(812): a, c, t or g
  modified_base (825)..(825): a, c, t or g
  modified_base (830)..(830): a, c, t or g
  modified_base (836)..(836): a, c, t or g
  modified_base (840)..(840): a, c, t or g
  modified_base (845)..(845): a, c, t or g
  modified_base (849)..(849): a, c, t or g
  modified_base (853)..(853): a, c, t or g
  modified_base (858)..(858): a, c, t or g
  modified_base (875)..(875): a, c, t or g
  modified_base (887)..(887): a, c, t or g
  modified_base (895)..(898): a, c, t or g
  modified_base (905)..(905): a, c, t or g
  modified_base (909)..(909): a, c, t or g
  modified_base (917)..(921): a, c, t or g
  modified_base (930)..(932): a, c, t or g
  modified_base (938)..(939): a, c, t or g
  modified_base (941)..(941): a, c, t or g
  modified_base (943)..(943): a, c, t or g
  modified_base (948)..(948): a, c, t or g
  modified_base (957)..(957): a, c, t or g
  modified_base (960)..(962): a, c, t or g
  modified_base (964)..(975): a, c, t or g
  modified_base (980)..(981): a, c, t or g
  modified_base (984)..(987): a, c, t or g
  modified_base (989)..(989): a, c, t or g
  modified_base (1002)..(1011): a, c, t or g
  modified_base (1013)..(1015): a, c, t or g
  modified_base (1022)..(1023): a, c, t or g
  modified_base (1025)..(1025): a, c, t or g
  modified_base (1029)..(1030): a, c, t or g
  modified_base (1038)..(1038): a, c, t or g
  modified_base (1043)..(1046): a, c, t or g
  modified_base (1048)..(1048): a, c, t or g
  modified_base (1054)..(1058): a, c, t or g
  modified_base (1061)..(1067): a, c, t or g
  modified_base (1071)..(1071): a, c, t or g
  modified_base (1074)..(1074): a, c, t or g
  modified_base (1081)..(1092): a, c, t or g
  modified_base (1095)..(1097): a, c, t or g
  modified_base (1102)..(1108): a, c, t or g
  modified_base (1116)..(1116): a, c, t or g
  modified_base (1120)..(1143): a, c, t or g
  modified_base (1151)..(1153): a, c, t or g
  modified_base (1155)..(1169): a, c, t or g
  modified_base (1171)..(1171): a, c, t or g
  modified_base (1175)..(1175): a, c, t or g
  modified_base (1178)..(1181): a, c, t or g
  modified_base (1183)..(1183): a, c, t or g
  modified_base (1185)..(1185): a, c, t or g
  modified_base (1187)..(1218): a, c, t or g
  modified_base (1220)..(1412): a, c, t or g
cagggcgaattatacgactcactatagggaatttggccctcgaggcaagaattcggcacgagggtttcatcttgtctcctcttatcactccagcctaggtgacagagtgagactccaactaaaagaaaataaataaataaatatataaatatataaataaataataaaagtaaactattgctgatgactccagggtcaatctggaaaaattaacagtattcctcaactccattactttctgcagaaagtaatggagttgaggaatactgttactttctgcagccaagcttgattccttgaattatagttttctaagaaaaaatagtttttaataatctaaggtaaatttgttgcaattattagcagcagcataataaggctttttgcgcaaatgaatgttattagctagagttattcaaaaaagaatgaagcacaatttttgctaggacttcttgagaactattcataaaaatgcttttagataataaacaagtataaatgtcaaaatatttttttaaaagtataattggccaggtgctggctcacgcctataatcccagcactctaggagactgaggcaggaggatcacttgagctcgggagtttgaggctgcagtgattcatgattgcaccactgccttccagcagcctgatgacagagtgggactccatctctttacatatgtatatcttactctcttgatgggacaagttggtagaaataaagattttttttttctgtggtgannnnnnnnnnnnnnnnnnnnnnnnnnnnnnnnnnnnnggggggggggggngggnntttccccctngggggggggggtnttttngggggnggcncgggnggcntttnaaaangggggggggggggaaancccgggggggtnccccaaannnnccccccngggngggggggnnnnnggggggggnnncccccnnananggggnggggggggnggnnntnnnnnnnnnnnnccccnnaannnngnggggggggggggnnnnnnnnnncnnnccccccnngngggnngggggggnggggnnnncncccccnnnnnccnnnnnnngggnggnggggggnnnnnnnnnnnnccnnnccccnnnnnnngggggggngggnnnnnnnnnnnnnnnnnnnnnnnngggggggnnngnnnnnnnnnnnnnnncncccnccnnnngngngnnnnnnnnnnnnnnnnnnnnnnnnnnnnnnnngnnnnnnnnnnnnnnnnnnnnnnnnnnnnnnnnnnnnnnnnnnnnnnnnnnnnnnnnnnnnnnnnnnnnnnnnnnnnnnnnnnnnnnnnnnnnnnnnnnnnnnnnnnnnnnnnnnnnnnnnnnnnnnnnnnnnnnnnnnnnnnnnnnnnnnnnnnnnnnnnnnnnnnnnnnnnnnnnnnnnnnnnnnnnnnnnn

SEQ ID NO: 327 - DNA, 3449 bp, Homo sapiens
aggcgttaacccagggaaggcagtggcaagatggcgtccctggatcgggtgaaggtactggtgttgggagactcaggtgttgggaaatcttcgttagtccatctcctatgccaaaatcaagtgctgggaaatccatcatggactgtgggctgctcagtggatgtcagagttcatgattacaaagaaggaaccccagaagagaagacctactacatagaattatgggatgttggaggctctgtgggcagtgccagcagcgtgaaaagcacaagagcagtattctacaactccgtaaatggtattattttcgtacacgacttaacaaataagaagtcctcccaaaacttgcgtcgttggtcattggaagctctcaacagggatttggtgccaactggagtcttggtgacaaatggggattatgatcaagaacagtttgctgataaccaaataccactgttggtaatagggactaaactggaccagattcatgaaacaaagcgccatgaagttttaactaggactgctttcctggctgaggatttcaatccagaagaaattaatttggactgcacaaatccacggtacttagctgcaggttcttccaatgctgtcaagctcagtaggttttttgataaggtcatagagaagagatactttttaagagaaggtaatcagattccaggctttcctgatcggaaaagatttggggcaggaacattaaagagccttcattatgactgaattacactcatcctttggaagagtgagcaagcagtggcagtttttcacagctcatcttgctgtgttcaattattaccatcacagccttttaacaaaatcatcttaaaatgctacccttcagccttaccctttaatggaaaaatgaaaggaagtgacaatacgggaggtccaaactttgtccctgttctctgtgttccttacctttctgtccctgtgtatagattatgtaaaagccttgtgtaaatatgagatgttgtcaaaatgatgcagtaaatgagcaatgacagtgtactgcagagaaaatttactcttgcctagaactggagggtttttatgggtctgtaattttcccacactcattgctgaaagcttaattaagtacttcaaaaacgtatctccattgttttaccttcttgaggggaacggtcttgttaaccagccctgagttgtctaccccaaacaatctctgtcattttcaaagatgcaaaatggtgttatttaattgtctccaccattgtcacacacaggaatgcctaataatagcaacccttgtctccctcttctctcctttgcaaatgggtcagtgactggaagaggcggactaatagccagagttaaatataaatacaaattaataatacatagagaacagcaataccagaaaaaaagaattctggtaaaatgatgtgaaaaattgacagctccctcactcttaaggttgctgctatatacagtctaggttttctgtttggaaataggtagggtaaaatctaagacctgcacaagggcagtgagagacatttacagcctcctctctatttgtttttttaaggaaaagtcaactcctgaaatgtcccttagctataatcagaaaactaagaatattattctgtgtcaacaatgtatttatggagagaagtaaaaataagttccacagcaacacatttacatgaattatgaactaggattcttggatttcataatcactccaaagctttttggggatggtgtgtgtgtgtgtgtgtgtccgtaattgttcatcattactttttttaacctatctttttgcttgcttaatcttctctgccccagttcttcctgagtatatgaatttgatttctaaaaacaatttattcaacactctatcacccgtattctctctctggctctgctgcaggtctctgcactcctgattttgctccatacttttaaataacaataataaatatacagttttcatttctcatttaaaaaataggtggaaaacaccaaattcactttctgttccattttaattaggtttcagaagtatcttggaaatcaaggtatgctgcaagaggatattaaaataagaatgttagagagtccttttagaaaggcagtcttgggaatttggaaaaggatttttaaagcagctttcatcagctagactgttctccagcctttctttacttcctctttgaaaggacatagccctggtttctttttgacacaaaggaaagctatgcaaatcatgatctgtatgtagaattggtcacaagtatgttgttgcataggctgtacagttgggaagtagaaaccaaatgctacccagagacctaacccaattaagctctttgtatttctccttcaagaaataaatcttccttccttctttcttcctctttcttttaattttaaaaaaattcatcctgatttttttattttctatcttatttaaaaaataaaaataggccaggcgcggtggctcacacctttaatcccaacactttgggaggcgggtggatcacttgatatcaggagtttgagaccagcctggccaacatagggaaaccctgtctctactaaaaatacaaaaattagccaggcctggtggcacgcgcctgtaatcccagctacttgggaggctgaggcaggagaatcacttgaacctgggaggtggaggttgcagtgagtcaagatcgtgtcactgcactccagcctaggtgacagagtgagactccaactaaaagaaaataaataaataaatatataaatatataaataaataataaaagtaaactattgctgatgactccagggtcaatctggaaaaattaacagtattcctcaactccattactttctgcagccaagcttgattccttgaattatagttttctaagaaaaaatagtttttaataatctaaggtaaatttgttgcaattattagcagcagcataataaggctttttgcgcaaatgaatgttattagctagagttattcaaaaaagaatgaagcacaatttttgctaggacttcttgagaactattcataaaaatgcttttagataataaacaagtataaatgtcaaaatatttttttaaaagtataattggccaggtgctggctcacgcctataatcccagcactctaggagactgaggcaggaggatcacttgagctcgggagtttgaggctgcagtgattcatgattgcaccactgccttccagcagcctgatgacagagtgggactccatctctttacatatgtatatcttactctcttgatgggacaagttggtagaaataaagattttttttttctgttgtgaaaaaaaaaaaaaaaaaaaaaaaaaaaaaaaaaaaaaaaaaaaaaaaaaaaaaaaaaaaaaaaaaaaaaaaaaaaaaaaaagaaaaaaaaaaaaaaaaaaaaaaaaaaaaaaa

SEQ ID NO: 328 - DNA, 343 bp, Homo sapiens
  modified_base (20)..(21): a, c, t or g
  modified_base (24)..(24): a, c, t or g
  modified_base (135)..(135): a, c, t or g
  modified_base (151)..(151): a, c, t or g
  modified_base (171)..(172): a, c, t or g
  modified_base (177)..(177): a, c, t or g
  modified_base (184)..(184): a, c, t or g
  modified_base (198)..(198): a, c, t or g
  modified_base (239)..(239): a, c, t or g
  modified_base (246)..(246): a, c, t or g
  modified_base (258)..(259): a, c, t or g
  modified_base (268)..(268): a, c, t or g
  modified_base (273)..(273): a, c, t or g
  modified_base (317)..(317): a, c, t or g
  modified_base (335)..(335): a, c, t or g
ttatttcattattacatttnnggnctttgctcttttacttctttattaagtttatagtaacagaatgatttacacatgttgaaaaacaaagcaggatgaaaaaggcaaaaagtaaagcaaaacattttactttangagtctcttactttgngaattctctcctatgctggnnatttngtttggntctgaggacaattngtgcacaaaaaatccgagacatctccattctccttaataangaaaagnagccagataggnnctgttaccnatggngaagggaattttgacatcacagagttgagggcagtgtgtgaccntgaggcaagtaatttcangtcttggg

SEQ ID NO: 329 - DNA, 363 bp, Homo sapiens
  modified_base (173)..(173): a, c, t or g
  modified_base (332)..(332): a, c, t or g
  modified_base (338)..(338): a, c, t or g
ggattttgctctgctgtctccatggaaaagtcaggtctctctgctccctggtgtgtaagtggacatattcagcagagaaaggctgggacgacagtttctggaaaatgattggtttggaagactttgttgcagataattacagcaaaataggaaaccaagtgctacctcctggnagcttctcttggaaatgggctcacaccagaggcagcaagagaccttggccttctccctgggattgcggtcgcagcttcactcattgatgcccatgcaggaggactaggagtgattggggcagatgtgagagggcacggccttcatctgtgagggggcanccagtnacgtcacggctgggcttgttcatct

SEQ ID NO: 330 - DNA, 1923 bp, Homo sapiens
cttcctcctcctggccgcttagtctcacacccgccgggccgttgttcccgagacgttgttgagtcccctgtgtcctcttctgggtggaggaactgcaatgtctggtggagaacagaaaccagagaggtactatgtgggtgtggacgttggaacaggcagtgtccgtgcagctctggtggaccagagtggggtcctgttggcttttgcagaccagccaattaagaattgggagccccagttcaaccaccatgagcagtcctccgaggacatctgggctgcgtgctgtgttgtcacaaagaaagttgtacaagggattgatttaaaccaaattcgaggacttgggtttgatgccacgtgttctctggttgttttggataagcagtttcacccattaccagtcaaccaggaaggggattcccatcgaaacgtcatcatgtggctggaccatcgagcagtcagtcaagttaacaggatcaatgagaccaagcacagtgtcctccagtacgtcgggggggtgatgtctgtggaaatgcaggccccgaaacttctgtggctgaaagagaacttgagagagatttgctgggataaggcgggacatttctttgatctcccggacttcttatcgtggaaggcaacaggtgtcacagcacggtctctctgctccctggtgtgtaagtggacatattcagcagagaaaggctgggacgacagtttctggaaaatgattggtttggaagactttgttgcagataattacagcaaaataggaaaccaagtgctacctcctggagcttctcttggaaatgggctcacaccagaggcagcaagagaccttggccttctccctgggattgcggtcgcagcttcactcattgatgcccatgcaggaggactaggagtgattggggcagatgtgagagggcacggcctcatctgtgaggggcagccagtgacgtcacggctggctgtcatctgtggaacgtcttcttgtcacatggggatcagcaaagacccgatttttgtaccaggcgtctgggggccttatttctcagccatggtacctgggttctggctgaatgaaggtggtcagagcgttactggaaaattgatagaccacatggtacaaggccatgctgcttttccagaactacaagtaaaggccacagccagatgccagagtatatatgcatatttgaacagtcacctggatctgattaagaaggctcagcctgtgggtttccttactgttgatttacatgtttggccagatttccatggcaaccggtctcccttagcagatctgacactaaagggcatggtcaccggattgaaactgtctcaggaccttgatgatcttgccattctctacctggccacagttcaagccattgctttggggactcgcttcattatagaagccatggaggcagcagggcactcaatcagtactcttttcctatgtggaggcctcagcaagaatcccctttttgtgcaaatgcatgcggacattactggcatgcctgtggtcctgtcgcaagaggtggagtccgttcttgtgggtgctgctgttctgggtgcctgtgcctcaggggatttcgcttctgtacaggaagcaatggcaaaaatgagcaaagttgggaaagttgtgttcccgagactacaggataaaaaatactatgataagaaataccaagtattcctgaagctggttgaacaccagaaggagtatttggcgatcatgaatgatgactgaacagggcttgcaggtgctgatgccagaagcttctgtgccattgcattaaagacttctgtcatttgatccatgttcaagacccttgaggtattgtttcatcatttctgtattgtctttcaataaagaaaacaaacatgtgcaaccaaaaaaaaaaaaaaaaaaaaaaaaaa

SEQ ID NO: 331 - DNA, 265 bp, Homo sapiens
  modified_base (80)..(80): a, c, t or g
  modified_base (114)..(114): a, c, t or g
  modified_base (197)..(197): a, c, t or g
  modified_base (255)..(255): a, c, t or g
taaaatgactaatttcacggagccttattatgatgaaatatacttatgaatgttaaccaacacaaaataataaactgggnctcttgtagtaagcaggttttatgtacataaaanctgaaaagaaattaaattgattcttaaatttcactccactgtatactgctaagagtgcaaactccaaaatgaccaattctggnttgaattatgtactccccttgggactcagagaatgggctcacactgacaagaatgtcnattttggtca

SEQ ID NO: 332 - DNA, 358 bp, Homo sapiens
  modified_base (238)..(238): a, c, t or g
  modified_base (299)..(299): a, c, t or g
  modified_base (313)..(313): a, c, t or g
  modified_base (345)..(345): a, c, t or g
  modified_base (350)..(350): a, c, t or g
cggatttcgagtgcttttctccttacctccaccctcccccatgttttaatgcagccctccaaaaatatttactgagtgtggactctagaccagggcctgtgctaggatacaaagatgaatgaggcaccacccttatcttcgagtagtatatgttttattttattttatttttttcccctgctgcctcccttgagtagtacatgttttagtaaggggaacagacactaaagagtccggntaatgatgagcaaagtactgcatgagtaagtatctggggggcaagtgtccccactagggantcctgtcagatctnggaaaaggcctgagggatctgattacatgganttaanggcagcgt

SEQ ID NO: 333 - DNA, 3949 bp, Homo sapiens
aggaagcggggggctagcggcctggcgctgcggcgaccgaccggggcgtcaggatccctggcccccggagagcgaagggcgggcgggtcccggagcaagaagaattgtatagaaatgtaaaaaacatttatgtgtgcttcacatgtggcatgaaaaaaatgaggacctctggtcaaaattgcctgagttcagaatttcatgctggaaggaaagttagacgtaacttctaatttctagttccagtaagcatctcttcttggaaaatttccaaaaaagagtcctgctctgttgcccaggctggagtacattggtgtgatgatcatggttcactgcagcctcgacctcccaggctcaagcaattctcctacctcagcctcctgagtaactgggactataggatttctttgaagaaaaatgtgcttcttgaatcaactgcagtctctcctctgcataagagctcttaagggtactagcaggatagaagcaaatgaaactgaaagctcatctgcagctcagaaaagcaaagacatggaattttaaagagtgaaggtagcatggtgtcggccatgggtgaacaagacacagccagacaatgtggaccaatttcttcaaactacggcttttctgctgtctgcttgcagtgttgatggtggtggtgctggtcatcaatgttactcaggtagagtacttggaccatgagactgtttcagccactttcatcgacagcagtggacagtttgtttcctcccaggtgacaggaattagccgaaatccctactgtggctatgatcagcagaccctgtccagccaggagcgcatggaggaggactccttgctggctgccttgcaccggcaggttcctgatgtgggcccagtcccctttgtgaagagcactgacccttcttccagctactttgtcatcttgaactctgctgccttctttaaggtgggaagccagcttgaggtgctggttcatgtgcaggattttcaaagaaagcccaagaagtatggtggagactacctgcaggccagaattcactccctcaagctgcaggctggggctgtgggcagggtggtggattaccagaatgggttttacaaggttttctttactttgctatggccaggcaaagttaaagtatccgtatctctggtccaccccagtgaagggatcagagttcttcagcgcttacaggaagataaaccagacagggtctatttcaagagtctcttccgttcaggaagaatttctgaaactactgagtgcaacgtgtgtcttcctgggaatctgcccctgtgtaactttacagacctctacactggggagccctggttctgcttcaaaccaaagaagctcccttgcagcagcagaattacccatttcaaaggtggatacctgaaaggtctcctaaccgctgcagagagtgctttcttccagagtggtgtcaatatcaaaatgccagtcaactccagtggacctgattgggtaactgtgattcccaggagaataaaagaaactaacagtctagaactatctcaaggctcaggaacttttccttctgggtattattataaagaccagtggaggcccagaaagtttaagatgcgtcagtttaatgaccctgacaacattacagagtgcttacaaagaaaagtggtgcatttatttggtgactcaacaatcaggcaatggtttgaataccttactacatttgttccagatttagtggagtttaacttgggtagtcccaagaatgtgggtcccttccttgcagtggaccagaagcacaacatcctgctcaaataccgctgccatggtccacccatccgcttcacgactgtctttagcaatgagctccattatgtggcgaatgagctgaatggcattgtgggagggaagaacacagtggttgccatagctgtatggtctcacttcagcaccttccctttggaagtgtacatccggcggctcaggaacatccgtcgagcagtggttcggctcctcgatcgaagcccaaagaccgtggtggtcatccggacggccaacgcccaagagctgggacctgaggtgagccttttcaacagcgactggtacaactttcagctggacaccatccttcggaggatgttctcaggggttggagtatatctcgtcgatgcctgggagatgaccctggcccattatctaccgcacaagctgcatccagatgaagttattgtgaagaaccagctggacatgttcttgtcctttgtgtgccccttggaaacctagcctgtcttggaagggactggaggaatcatattcaatgaccttctcaattgacctgagttacagaaagtggccccagtgagagatgactgcccttaataagtataaaatttcaaaaagatctggacttaatatgatgacttataaggagcttagaaaatgcaggttacatttatatctacctataggattttatccaatgttgacttagccatggtagaactcttaactgcatctacacactatattgctcttgtaaccaaagatgctaatgagtgtatttgaattagcttctcctaggaggggtgactactttgctaaagagtatgaaaaatgttttgatggaagggacaagtttggttggtagtagagtgtttgtagcttatctggtaaaggaaattgagtgcatctgcatgcatagcacaagtaatccatcttctggcggttaactagagaaagcttatagtcagaggctcttgtgaatgcactgaagactgctgtgtctcaggagtttctcttgatgatctaccttttctgaattacttgaaaaggccaatgtgcttggttcgagttttttagtgaatatttacaatttcctgcttttatctagaaaagaagcaaaagggaaatatgaaagcagtatatataaaatctgtgctttggaattgatatttgcatttggtgattgttttttatttgattcagctaaattttatgtgttgaatacttactctagaataactacttttggaactggaagggggaaatctgtaaatggaaatttatttttatgttctgaaatttgagggtttaggaattgacttttgtgtaaagaatgctacggtattataaagctgtggaagttttttccactagtttcaggtgtttttttttttgttgttgttgttgttgttattttgaactacttaccaaaattagaagttaaaatctaattagaaattaataagatactaaaattcatgacagttttttgtttgtttgtttgtttgttttttggtatttcttgatttgggcataaaaggcacacccattctctcatgcttggaagaagctgctattcctactggctatctaagaagaatggaattattaattttatttgacttattaattttaaacgagtttaatttgggatcatttagtaagtactcttttctttttgagctgtgatagattatagtctagtttaagttgctcctaagtagacagatgaagaaactagggaggctttagagaggaagacagatgcttgaagtatgaacaatatatacccttagaagaatgggtcaaataatttgggtttttaatttaaaataggagggccccagatcttactttcctgtccttgaggaacaccttcaagtttttaaagtattttagggggaaagaagatttttaattgtttctgagcctaatgaggtaataaaatatattaaaatagtttaattttaatggtccttacgctttacagtacctaaggatcacttgtagtatctgacaaaaatgcagaattaaagagtcatggcagggtgtggtagctcaagcctgtaatcccagcactttgggaggccaggcaggaggattgcttgaggccaggagtttgagaccagcctgggcaacatagtaagacctcatctccacaaaaaaaaaaaaaaaaaa

SEQ ID NO: 334 - DNA, 427 bp, Homo sapiens
tttttatggaagattcttaatgttttattagtctaaatatggagccaattaatcacttcattaatacattgaaaactattctgggaatattgagcataatcttactcttgtacacttggaacataagagaaattttcaattaaaattaattgactctgatttttaaaaaatctacttgatcaggagcacattgctttgctggtgtctgtgagcagctggagatggtggtgaacggtctgtttgcatttcttggaagaagatcttttattctgctgctcaacccaggtctctgccttccttagagactgaggcccatccttcagtttccctgattctggagaatggcccgcagcctcccactcagggcttggctgtgctcctctagtccatcccagggctggaagggacatccctggcgggacacaaa

SEQ ID NO: 335 - DNA, 1536 bp, Homo sapiens
acagagcttcaaaaaaagagcgggacagggacaagcgtatctaagaggctgaacatgaatccacagatcagaaatccgatggagcggatgtatcgagacacattctacgacaactttgaaaacgaacccatcctctatggtcggagctacacttggctgtgctatgaagtgaaaataaagaggggccgctcaaatctcctttgggacacaggggtctttcgaggccaggtgtatttcaagcctcagtaccacgcagaaatgtgcttcctctcttggttctgtggcaaccagctgcctgcttacaagtgtttccagatcacctggtttgtatcctggaccccctgcccggactgtgtggcgaagctggccgaattcctgtctgagcaccccaatgtcaccctgaccatctctgccgcccgcctctactactactgggaaagagattaccgaagggcgctctgcaggctgagtcaggcaggagcccgcgtgacgatcatggactatgaagaatttgcatactgctgggaaaactttgtgtacaatgaaggtcagcaattcatgccttggtacaaattcgatgaaaattatgcattcctgcaccgcacgctaaaggagattctcagatacctgatggatccagacacattcactttcaactttaataatgaccctttggtccttcgacggcgccagacctacttgtgctatgaggtggagcgcctggacaatggcacctgggtcctgatggaccagcacatgggctttctatgcaacgaggctaagaatcttctctgtggcttttacggccgccatgcggagctgcgcttcttggacctggttccttctttgcagttggacccggcccagatctacagggtcacttggttcatctcctggagcccctgcttctcctggggctgtgccggggaagtgcgtgcgttccttcaggagaacacacacgtgagactgcgcatcttcgctgcccgcatctatgattacgaccccctatataaggaggcgctgcaaatgctgcgggatgctggggcccaagtctccatcatgacctacgatgagtttgagtactgctgggacacctttgtgtaccgccagggatgtcccttccagccctgggatggactagaggagcacagccaagccctgagtgggaggctgcgggccattctccagaatcagggaaactgaaggatgggcctcagtctctaaggaaggcagagacctgggttgagcagcagaataaaagatcttcttccaagaaatgcaaacagaccgttcaccaccatctccagctgctcacagacaccagcaaagcaatgtgctcctgatcaagtagattttttaaaaatcagagtcaattaattttaattgaaaatttctcttatgttccaagtgtacaagagtaagattatgctcaatattcccagaatagttttcaatgtattaatgaagtgattaattggctccatatttagactaataaaacattaagaatcttccataattgtttccacaaacact

SEQ ID NO: 336 - DNA, 529 bp, Homo sapiens
  modified_base (5)..(5): a, c, t or g
  modified_base (22)..(22): a, c, t or g
  modified_base (40)..(40): a, c, t or g
  modified_base (45)..(45): a, c, t or g
  modified_base (56)..(56): a, c, t or g
  modified_base (62)..(62): a, c, t or g
  modified_base (88)..(88): a, c, t or g
  modified_base (91)..(91): a, c, t or g
  modified_base (110)..(110): a, c, t or g
  modified_base (122)..(122): a, c, t or g
  modified_base (146)..(146): a, c, t or g
  modified_base (488)..(488): a, c, t or g
  modified_base (495)..(495): a, c, t or g
  modified_base (505)..(505): a, c, t or g
  modified_base (513)..(513): a, c, t or g
  modified_base (523)..(523): a, c, t or g
ggcangagggatttggacctgnaccaatggttgaactggnaaggncttgaacttgncaatgnctatatttgtttacatctgagttagnagncttgcccaatgagataagnctttttcccagnacttcacacttactcaaaaaaagnacattggaaaacgcctattttaaatatgttcaaagaaccaaaggtaaacaacgtctcaccaaatagagaaaatcaataatgagatagaaattacggaaggaaaagccaaaaaggaatgaacagattctcagagacctgtgggacactgtcagatgtaccaacatagggcatgatgaaagtctcatgtcaaccataattttcacccatagccatacatgcccaagagaattgaaaacatgtaatacttgaatgtgaatgttcatagtggcataatagctaaaaaaaaaggcccagatatccatcatctgatgatgagtgaacagtgtggttttgcatacagtnggcttgnttcaggcatnaaaagggntgaagtttgntcagct

SEQ ID NO: 337 - DNA, 343 bp, Homo sapiens
  modified_base (184)..(185): a, c, t or g
  modified_base (293)..(293): a, c, t or g
tgctacccaggctggagtgcagtggcatgatcatagctcaccacagccttgaccacctgggctcaagggatcctcccacctcagccacctgagtagctgagaataaaggtgtgtgccaccatgcccaggtaatttttaaatttttttgtagagatggggtctcgccatcttgcccaggattggnnctcaaactcctggggctcaagtgatccgcccacagtgctgggattacaggcgtgaaccactgcacccagaggcagtaacatttctgtactaattgggaaatgactagnaaaatcacctttcagggcaatgtttcttcttgcttttcctctaaaaaggg

SEQ ID NO: 338 - DNA, 452 bp, Homo sapiens
  modified_base (311)..(311): a, c, t or g
  modified_base (354)..(354): a, c, t or g
  modified_base (422)..(422): a, c, t or g
  modified_base (436)..(436): a, c, t or g
cagcattttactttttcccccctcaaataaaaaaaataaataaaacattctctttcattttaggttgcccgtcaacaaaaatcaggcatgttctgtgaaagtcagcatggcttccatctcagacatccttttctgtgcaaaaggaaaaagttaccagagtattgtacccaaacaaaaaggaatttttgttgttttgtcctgggactttcctctaactctttgggaactattttaatatttataaacttggggttgtataatctattgcaataaaaaatattaggatactctatggccaaaacttgctaccnggccaggtgtggatgggctccacacctgttaatccccaggcantttgggggagggcccaaggcggggccggattcaacttgagggttcaggggagtttcggaggacccagntcgggggccaaccntgggggggaaaccccc

SEQ ID NO: 339 - DNA, 1366 bp, Homo sapiens
gagacatggtgctgtcggagctagcggcgcgcctcaactgcgccgagtacaagaactgggtgaaggcgggccactgcctgctactgctgcgcagctgcctgcagggtttcgtcggccgcgaggtgctctccttccaccgcggcctactcgccgcagcccccggcctggggccccgcgccgtctgccgcggcggctcacggtgcagccctcgcgcccgccagtttcagcctcagtgtcaggtgtgcgctgaatggaaaagggagattttgagacatcatgtcaacagaaatggagatgtgcactggggaaactgccggccgggccgctggcccgtggacgcctgggaggtggccaaggccttcatgccccgaggactagcagacaaacaaggacctgaggaatgtgatgcagttgctcttttaagtctcatcaactcctgcgatcacttcgtggttgatcgaaagaaagtcacagaggtaattaaatgtcgtaatgagatcatgcactcttcagagatgaaagtatcttctacgtggcttcgagattttcagatgaagatccaaaattttctgaatgaattcaagaacatcccagagattgtggcagtatactccagaatagaacagctgttgacgtctgactgggctgttcacatccccgaggaagatcagcgagatgggtgtgaatgtgaaatgggaacttacctgagtgagagccaagtcaatgaaatagaaatgcagttactaaaggagaaacttcaagagatatatcttcaagcagaagaacaagaggtgttgcctgaagagctctcaaatcgactggaagtggtgaaggaatttctgagaaacaatgaggatcttagaaatggccttacagaagatatgcagaagctagacagcctctgtctacatcaaaaactggattcacaggaacctgggagacaaacacctgacaggaaggcctgaggttgcccgtcaacaaaaatcaggcatgttctgtgaaagtcagcatggcttccatctcagacatccttttctgtgcaaaaggaaaaagttaccagagtattgtacccaaacaaaaaggaatttttgttgttttgtcctggactttcctctaactctttggaactattttaatatttataaacttggggttgtataatctattgcaataaaaaatattagatactctatgccaaaacttgctaccaggccaggtgtgatggctcacacctgtaatccccagcactttgggaggccaaggcgggcggatcacctgaggtcaggagttcgagaccagcctggccaacatggcgaaaccccatctctacttaaaaaaaaaaaaaaaaaaaaaaaaaaaaaaaaaa

SEQ ID NO: 340 - DNA, 382 bp, Homo sapiens
  modified_base (46)..(46): a, c, t or g
  modified_base (121)..(121): a, c, t or g
  modified_base (199)..(199): a, c, t or g
  modified_base (261)..(261): a, c, t or g
  modified_base (295)..(295): a, c, t or g
  modified_base (347)..(347): a, c, t or g
  modified_base (363)..(363): a, c, t or g
tgccatgttgcctaggctggtttcaaactcctgagctcatgcgatnctgcccgccttggcctcccaaagtgctgggattacaggcatgagccactgtgcccggcctctttgctcctatttncctctggggagttttatatttccctgatagattttagtattcctcatatacactgacgaatttcccttcatatctatngtaaagtttatcctgctgctcaaagtttaattttgctttccacatgcaggatactaaccttngtattcaaacttcatatgggtgtgtgtgtggggngtgtgtgcacatgtgtgattccttctcttcattttaagtttgggaatatccngtcctgcccagtgggncaggatactaaggggcatc

SEQ ID NO: 341 - DNA, 431 bp, Homo sapiens
  modified_base (1)..(1): a, c, t or g
  modified_base (384)..(384): a, c, t or g
  modified_base (404)..(404): a, c, t or g
ngatccccaccccattgttcttgtcaatgagcaggagtggggtggacctgccatcctgcgaatcctttacagcctgcagcgctccctgccaactcttcacaaccattagcacccactaacaatccatttcccctggagctcttcactctaaagatagaagaccaaaaaatagaagtgtcctcatttctcacagtactacaggaggaggtgagaaccgatgcatccgtgcatcttagagaatctcatttcagacctcggctttgagtgcgcctcctgctcagtcagccctctccctcgctgcaggttgacgtggtcagacagtggcgcagtcaggcagccttgattttcggttctggggtttggtccaaggattgaccgggtccnttttgttcattgccccttcntgttgcaacccctgggtttgttttggc

SEQ ID NO: 342 - DNA, 6276 bp, Homo sapiens
gagtgtggctgcagtgcgccgggacaccagggctccgcgctccgcactcaagaggctcccgcgtcccaacccctcgcgcccgcgcgttcgcggatccaggccgaggaccgaaaggggccgcccgagcccccggggccggcgcccagagagcccagcaaggccggccgccctgccggtgtgccgccggcgggtgcttctggaagggccaatgcgttcgggcagcagccctgaagccgagcccgaggctaagtgggactgaccggggcccagagtggacgaaccgccagcatggggagagaccagcgcgcggtggccggccctgccctacggcggtggctgctgctggggacagtgaccgtggggttcctcgcccagagcgtcttggcgggtgtgaagaagtttgatgtgccgtgtggaggaagagattgcagtgggggctgccagtgctaccctgagaaaggtggacgtggtcagcctgggccagtgggcccccaggggtacaatgggccaccaggattacaaggattccccgggctgcagggacgtaaaggagacaagggtgaaaggggagcccccggagtaacaggacccaagggcgacgtgggagcaagaggcgtttctggattccctggtgccgatggaattcctggacacccggggcaaggtgggcccaggggaaggccgggctacgatggctgcaacggaacccagggagactcaggtccacaggggccccccggctctgaggggttcaccgggcctcccgggccccaaggaccaaaagggcagaaaggtgagccttatgcactgcctaaagaggagcgcgacagatatcggggtgaacctggagagcctggattggtcggtttccagggacctcccggccgccctgggcatgtgggacagatgggtccagttggagctccagggagaccaggaccacctggaccccctggaccaaaaggacagcaaggcaacagaggacttggtttctacggagttaagggtgaaaagggtgacgtagggcagccgggacccaacgggattccatcagacaccctccaccccatcatcgcgcccacaggagtcaccttccacccagatcagtacaagggtgaaaaaggcagtgagggggaaccaggaataagaggcatttccttgaagggagaagaaggaatcatgggctttcctggacttaggggttaccctggcttgagtggtgaaaaaggatcaccaggacagaagggaagccgaggcctggatggctatcaagggcctgatggaccccggggacctaagggagaagccggagacccagggccccctggactacctgcctactcccctcacccttccctagcaaaaggtgccagaggtgacccaggattcccaggggcccaaggggagccaggaagccagggtgagccaggagacccgggcctcccaggtccccctggcctctccattggagatggagatcagaggagaggcctgccgggtgagatgggacccaagggcttcatcggagaccccggcatccctgcgctctacgggggcccacctggacctgatggaaagcgagggcctccaggaccccccgggctccctggaccacctggacctgatggcttcctgtttgggctgaaaggagcaaaaggaagagcaggcttccctgggcttcccggctcccctggagcccccggaccaaaggggtggaaaggtgacgctggggaatgcagatgtacagaaggcgacgaagctatcaaaggtcttccaggactgccaggacccaagggcttcgcaggcatcaacggggagccggggaggaaaggggacaaaggagaccccggccaacacggcctccctgggttcccagggctcaagggagtgcctggcaacattggtgctcccggacccaaaggagcaaaaggagattccagaacaatcacaaccaaaggtgagcggggacagcccggcgtcccaggtgtgcccgggatgaaaggtgacgatggcagcccaggccgcgatgggctcgatggattccccggcctcccaggccctcccggtgatggcatcaagggccctccaggggacccaggttatccaggaatacctggaacgaagggtactccaggagaaatgggccccccaggactgggccttcccggcctcaaaggccaacgtggtttccctggagacgccggcttacctggaccaccaggcttcctgggccctcctggccccgcagggaccccaggacaaatagattgtgacacagatgtgaaaagggccgttggaggtgacagacaggaggccatccagccaggttgcataggagggcccaagggattgccaggcctgccaggacccccaggccccacaggtgccaaaggcctccgaggaatcccaggcttcgcaggagctgatggaggaccagggcccaggggcttgccaggagacgcaggtcgtgaagggttcccaggacccccagggttcataggaccccgaggatccaaaggtgcagtgggcctccctggcccagatggatccccaggtcccatcggcctgccagggccagatgggccccctggggaaaggggcctccctggagaagtcctgggagctcagcccgggccacggggagatgctggtgtgcctggacagcctgggcttaaaggccttcccggagacagaggcccccctggattcagaggaagccaagggatgcctgggatgccagggctgaagggccagccaggcctcccaggaccttccggccagccaggcctgtatgggcctccaggactgcatggattcccaggagctcctggccaagaggggcccttggggctgccaggaatcccaggccgtgaaggtctgcctggtgatagaggggaccctggggacacaggcgctcctggccctgtgggcatgaaaggtctctctggtgacagaggagatgctggcttcacaggggagcaaggccatccaggaagccctggatttaaaggaattgatggaatgcctgggacccccgggctaaaaggagatagaggctcacctgggatggatggtttccaaggcatgcctggactcaaagggagacccgggtttccagggagcaaaggcgaggctggatttttcggaatacccggtctgaagggtctggctggtgagccaggttttaaaggcagccgaggggaccctgggcccccaggaccacctcctgtcatcctgccaggaatgaaagacattaaaggagagaaaggagatgaagggcctatggggctgaaaggatacctgggcgcaaaaggtatccaaggaatgccaggcatcccagggctgtcaggaatccctgggctgcctgggaggcccggccacatcaaaggagtcaagggagacatcggagtccccggcatccccggtttgccaggattccctggggtggctggcccccctggaattacgggattcccaggattcataggaagccggggtgacaaaggtgccccagggagagcaggcctgtatggcgagattggcgcgactggtgatttcggtgacatcggggacactataaatttaccaggaagaccaggcctgaagggggagcggggcaccactggaataccaggtctgaagggattctttggagagaagggaacagaaggtgacatcggcttccctgggataacaggcgtgactggagtccaaggccctcctggacttaaaggacaaacaggctttccagggctgactgggcctccagggtcgcagggagagctggggcggattggactgcctggtggcaaaggagatgatggctggccgggagctccgggcttaccaggttttccgggactccgtgggatccgcggcttacacggcttgccaggcaccaagggctttccaggatccccaggttctgacatccacggagacccaggcttcccaggccctcctggggaaagaggtgacccaggagaggccaacacccttccaggccctgtgggagtcccaggacagaaaggagaccaaggagctccaggggaacgaggcccacctgggagcccaggacttcaggggttcccaggcatcacacccccttccaacatctctggggcacctggtgacaaaggggcgccagggatatttggcctgaaaggttatcggggcccaccagggccaccaggttctgctgctcttcctggaagcaaaggtgacacagggaacccaggagctccaggaaccccagggaccaaaggatgggccggggactccgggccccagggcaggcctggtgtgtttggtctcccaggagaaaaagggcccaggggtgaacaaggcttcatggggaacactggacccaccggggcggtgggcgacagaggccccaagggacccaagggagacccaggattccctggtgcccccgggactgtgggagcccccgggattgcaggaatcccccagaagattgccgtccaaccagggacagtgggtccccaggggaggcgaggcccccctggggcaccgggggagatggggccccagggcccccccggagaaccaggttttcgtggggctccagggaaagctgggccccaaggaagaggtggtgtgtctgctgttcccggcttccggggagatgaaggacccataggccaccaggggccgattggccaagaaggtgcaccaggccgtccagggagcccgggcctgccgggtatgccaggccgcagcgtcagcatcggctacctcctggtgaagcacagccagacggaccaggagcccatgtgcccggtgggcatgaacaaactctggagtggatacagcctgctgtacttcgagggccaggagaaggcgcacaaccaggacctggggctggcgggctcctgcctggcgcggttcagcaccatgcccttcctgtactgcaaccctggtgatgtctgctactatgccagccggaacgacaagtcctactggctctctaccactgcgccgctgcccatgatgcccgtggccgaggacgagatcaagccctacatcagccgctgttctgtgtgtgaggccccggccatcgccatcgcggtccacagtcaggatgtctccatcccacactgcccagctgggtggcggagtttgtggatcggatattccttcctcatgcacacggcggcgggagacgaaggcggtggccaatcactggtgtcaccgggcagctgtctagaggacttccgcgccacaccattcatcgaatgcaatggaggccgcggcacctgccactactacgccaacaagtacagcttctggctgaccaccattcccgagcagagcttccagggctcgccctccgccgacacgctcaaggccggcctcatccgcacacacatcagccgctgccaggtgtgcatgaagaacctgtgagccggcgcgtgccaggaagggccattttggtgcttattcttaacttattacctcaggtgccaacccaaaaattggctttatttttttcttaaaaaaaaaaaagtctaccaaaggaatttgcatccagcagcagcacttagacctgccagccactgtcaccgagcgggtgcaagcactcggggtccctggagggcaagccctgcccacagaaagccaggagcagccctggcccccatcagccctgctagacgcaccgcctgaaggcacagctaaccacttcgcacacacccatgtaaccactgcactttccaatgccacagacaactcacattgttcaactcccttctcggggtgggacagacgagacaacagcacacaggcagccagccgtggccagaggctcgaggggctcaggggctcaggcacccgtccccacacgagggccccgtgggtgggcctggccctgctttctacgccaatgttatgccagctccatgttctcccaaataccgttgatgtgaattattttaaaggcaaaaccgtgctctttattttagaaaacactgataatcacactgcggtaggtcattcttttgccacatccctatagaccactgggtttggcaaaactcaggcagaagtggagacccttctagacatcactgtcagccttgctacttgaaggtacaccccatagggtcggaggtgctgtccccactgccccacgttgtccctgagatttaacccctccactgctgggggtgagctgtactcttctgactgccccctcctgtgtaacgactacaaaataaaacttggttctgaatatttttaaaaaaaaaaaaaaaa

SEQ ID NO: 343 - DNA, 307 bp, Homo sapiens
  modified_base (4)..(4): a, c, t or g
  modified_base (57)..(57): a, c, t or g
  modified_base (60)..(60): a, c, t or g
  modified_base (65)..(65): a, c, t or g
  modified_base (72)..(72): a, c, t or g
  modified_base (177)..(177): a, c, t or g
  modified_base (229)..(229): a, c, t or g
  modified_base (242)..(242): a, c, t or g
  modified_base (279)..(279): a, c, t or g
  modified_base (287)..(287): a, c, t or g
  modified_base (295)..(295): a, c, t or g
gganaccgcccccacaccataccagaatctgtggatgctcaatcccttacatataanggngtaanatttccntataaccaacacgcatcccccctatacttaatttacttagcgacaggattgccctctgttgcttacgcctggagtgcagtgtcatcctctgtaactcaggatggnagtgcggtgtcacgatcacaggctcactgtaggcctcaacctcctgggggcnccagtgatcccgnccacctaaggcctcttgagtaggtgaggaccacaggnggcatacnaccaaacnggggtatttttc

SEQ ID NO: 344 - DNA, 301 bp, Homo sapiens
  modified_base (6)..(6): a, c, t or g
  modified_base (67)..(67): a, c, t or g
  modified_base (126)..(126): a, c, t or g
  modified_base (134)..(134): a, c, t or g
  modified_base (144)..(144): a, c, t or g
  modified_base (150)..(150): a, c, t or g
aagccnttgcatcatttttattttcaataaaagtgaattgtcttttacaaaaccatggcgtcctggnaaagttgcatcactggggcggcttctggccaaggaagaggctcttggtggagaggactntgaagccntcggcaggtntgcccncggttgtgctgtcggcgctggctgccttactgacttcaccctgcttcttcttggatttccgggcccctttcttgcctcctgcttttttagatacaggcttcttctggggatggagacttggcctttttggctggggggtgggtgtgatgat

SEQ ID NO: 345 - DNA, 339 bp, Homo sapiens
gccaaaggaaagttggaagccatcatcacaccacccccagccaaaaaggccaagtctccatcccagaagaagcctgtatctaaaaaagcaggaggcaagaaaggggcccggaaatccaagaagaagcagggtgaagtcagtaaggcagccagcgccgacagcacaaccgagggcacacctgccgacggtttcacagtcctctccaccaagagcctcttccttggccagaagccgccccagtgatgcaactttgccagggacgccatggttttgtaaaagacaatttcattttatttgaaaataaaaatgatggcaaagggtttttaaggacctgaaaaa

SEQ ID NO: 346 - DNA, 1923 bp, Homo sapiens
gactgtctacattagtaattcccaacttgggtccgaaagtgaacttttgctgaagcgaagtagctaaccgcttccatgtgcaaggcaggttccagacttcggggtgaggaggattaactgaaggaccccaggggaaccggtgtgctcactgatccgcctccagggccaccgccatgtcgagccgcggtgggaagaagaagtccaccaagacgtccaggtctgccaaagcaggagtcatctttcccgtggggcggatgctgcggtacatcaagaaaggccaccccaagtacaggattggagtgggggcacccgtgtacatggccgccgtcctggaatacctgacagcggagattctggagctggctggcaatgcagcgagagacaacaagaagggacgggtcacaccccggcacatcctgctggctgtggccaatgatgaagagctgaatcagctgctaaaaggagtcaccatagccagtgggggtgtgttacccaacatccaccccgagttgctagcgaagaagcggggatccaaaggaaagttggaagccatcatcacaccacccccagccaaaaaggccaagtctccatcccagaagaagcctgtatctaaaaaagcaggaggcaagaaaggggcccggaaatccaagaagcagggtgaagtcagtaaggcagccagcgccgacagcacaaccgagggcacacctgccgacggcttcacagtcctctccaccaagagcctcttccttggccagaagctgaaccttattcacagtgaaatcagtaatttagccggctttgaggtggaggccataatcaatcctaccaatgctgacattgaccttaaagatgacctaggaaacacgctggagaagaaaggtggcaaggagtttgtggaagctgtcctggaactccggaaaaagaacgggcccttggaagtagctggagctgctgtcagcgcaggccatggcctgcctgccaagtttgtgatccactgtaatagtccagtttggggtgcagacaagtgtgaagaacttctggaaaagacagtgaaaaactgcttggccctggctgatgataagaagctgaaatccattgcatttccatccatcggcagcggcaggaacggttttccaaagcagacagcagctcagctgattctgaaggccatctccagttacttcgtgtctacaatgtcctcttccatcaaaacggtgtacttcgtgctttttgacagcgagagtataggcatctatgtgcaggaaatggccaagctggacgccaactaggctgagcaatgacagaaccagctgcaccatgtaccccaccttcagtttaaaagaaaaaaaaaatccccttcactcctactgggaggtgggacccctttcattttcagttttgctcatctagggaaaataaggctttggtttccagtttaattgtttttgaccttctaaaatgtttttatgttagcactgatagttggcattactgttgttaagcactgtgttccagaccgtgtctgacttagtgtaacctaggagattttatagttttattttaatgaaaccctgattgacgcacagcagtggggagaacagcgtcttttacctgtcaccgaagccaggaagccccgtttgtaagcgtgtgttgtggtgctttattgtacatcctccagtggcgttctttttactctaatgttcttttggtttcccccctcagaagaatcatgaatttgcaacagacctaatttttggttactttttgtcttattgatggatttgaaaatgaaagatttaataaggcaaagcagaatctgttgtccttaattatatttgcaatttggaatttgtgtgagttgatttagtaaaatgttaaaccgttaaaaaaaaaaaaaaaaaaaaaaaaaaaaaaaaaaaaaaa

SEQ ID NO: 347 - DNA, 247 bp, Homo sapiens
gcggccccgcacaggggcattgtccagaggtgctgtgtgtcaccaactggtcttctaatttggaaggagttggaaaggcctttttgttgatgaaaagttggaaacagtggcacatatctgagagggaggaacgaggcagcgtggtgaagcccaggaaaagatggctaagcctttgttaaaccaatcacagcggtgggtggaaagcatgaattttcccctcggcagtggggtaacggaaaaagagccg

SEQ ID NO: 348 - DNA, 237 bp, Homo sapiens
  modified_base (72)..(72): a, c, t or g
  modified_base (103)..(103): a, c, t or g
  modified_base (145)..(145): a, c, t or g
  modified_base (155)..(155): a, c, t or g
  modified_base (178)..(178): a, c, t or g
  modified_base (200)..(200): a, c, t or g
  modified_base (212)..(212): a, c, t or g
gccaggacgtggccagaaggtagtggccttgcgaaagaagcagcaactggccatcgggcctgcaagtcactncccaactcgcccagccactcggccgtgtccnccgcctccatcccggccgtgcacatcaaccaggccacgaatngcggcggcangctttcagcgactactcgtcctnagtcccctccacccccagcatnagccagcggganttcggcattcgagaccatcgctgcc

SEQ ID NO: 349 - DNA, 3152 bp, Homo sapiens
gccatgaacttccaggcgggcggggggcagagcccgcagcagcagcagcagctggccggcgggcccccccagcagttcgcgctctccaactccgcggccatccgggccgagatccagcgcttcgagtccgtgcatcccaatatctacgccatctacgacctgatcgagcgcatcgaggatttggcgctgcagaaccagatccgggagcacgtcatctccatcgaggactcgtttgtgaacagccaggagtggacgctgagccgctccgtaccggagcttaaagtgggcatagtggggaacctgtctagcgggaagtcagccctggtgcaccgctatctgacggggacctatgtccaggaggagtcccctgaaggggggcggtttaagaaggagattgtggtggatggccagagttacctgctgctgatccgagatgaaggaggcccccctgagctccagtttgctgcctgggtggatgcagtggtgtttgtgttcagcctggaggatgaaatcagtttccagacggtgtacaactacttcctgcgtctctgcagcttccgcaacgccagcgaggtgcccatggtgcttgtgggcacgcaggatgccatcagcgctgcgaatccccgggttatcgacgacagcagagcccgcaagctctccacagatctgaagcggtgcacctactatgagacgtgcgcgacctacgggctcaatgtggagcgtgtcttccaggacgtggcccagaaggtagtggccttgcgaaagaagcagcaactggccatcgggccctgcaagtcactgcccaactcgcccagccactcggccgtgtccgccgcctccatcccggccgtgcacatcaaccaggccacgaatggcggcggcagcgccttcagcgactactcgtcctcagtcccctccacccccagcatcagccagcgggagctgcgcatcgagaccatcgctgcctcctccacccccacacccatccgaaagcagtccaagcggcgctccaacatcttcacgtctcggaagggtgctgacctggaccgggagaagaaggctgccgagtgcaaggtggacagcatcgggagcggccgcgccatccccatcaagcaggggatcctgctaaagcggagcggcaagtccctgaacaaggagtggaagaagaagtatgtgacgctctgtgacaacgggctgctcacctatcaccccagcctgcatgattacatgcagaacatccacggcaaggagattgacctgctgcggacaacggtgaaagtgccagggaagcgcctgccccgagccacacctgccacagccccgggcaccagcccccgtgccaacgggctgtccgtggagcggagtaacacacagctgggtgggggcacaggtgccccccactcggccagcagcgcatccctgcactctgagcgccccctcagcagctcggcctgggctggcccgcgccctgaggggctgcaccagcgctcctgctccgtttccagcgccgaccagtggagtgaggccaccacttccctgcccccaggcatgcagcaccctgccagtggcccagctgaggtactcagttccagccccaagctggatcctcccccatctccccactccaaccggaagaagcaccggaggaaaaagagcaccgggaccccccgaccagacggccccagcagtgctactgaagaggcagaggagtcgtttgaatttgtggtggtgtccctcactgggcagacgtggcacttcgaggcttcaacggcggaggagcgggagctgtgggttcagagtgtgcaggcccagatccttgccagcctgcaaggctgccgcagtgccaaggacaagactcgactggggaaccagaacgcagctctggctgtgcaggccgtccgcaccgtccgcggcaacagcttttgtatcgactgcgatgcacccaatccagactgggccagcctgaacctgggtgccctgatgtgcattgagtgctcaggcatccaccgacacctgggggctcacctgtcccgggtgcgctcccttgacctcgatgactggccgcctgagctgctggctgtcatgactgccatgggcaatgccctcgccaacagcgtctgggagggggccttgggtggctactccaagccagggcctgatgcctgcagagaggagaaggaacgctggatacgggccaagtatgaacagaagctcttcctggccccactgccaagctcagatgtgccactggggcagcagctgctccgggccgtggtggaagatgacctgcggctgttggtgatgctcctggcacatggctccaaagaggaggtgaatgagacctatggggacggggacgggcggacggctctacatctctccagtgccatggccaacgttgtcttcacgcagctgctcatctggtacggggtggacgtgaggagccgggacgcccggggcctgactccactggcatatgctcgccgggccggcagccaggagtgtgcagacatcttgatccagcatggctgccctggggagggctgtggcttagcgcctacccccaacagagagcctgccaatggcaccaacccctctgctgagctgcaccgtagtcctagcctcctataaggcccaggaagagggcagaggggccagaaggactccatggcccaaagaccctcctccctgcaggcactgtgggaacagacacagagatggagaagcagggacatgctgagaggacgaagccaaggaaattagggaggagagtcaaagggatcaaggagagttggggatttgagctgcagcagagagggatgagggatttagccctctgccctaaggtgccattgaaaagggacaggacccttcggaggtgcctgtgaggagaggggagcaggacctctccctcctccagatccctgcctcctagtgccagcccctcacacgccttcatcctgaaacaggaagaggacggcaccaagttgggggtgctggatgaaagagacgaggggtgatctgtgagtcccatgtaaactttgtacattggaatatttatgtttgtgtacatatttgatgtgtgtgtgtatgatgagccaataaaccagactgtgtgcgtggcaaaaaaaaaaaaaaaaaaaaaaaaaaaa

SEQ ID NO: 350 - DNA, 468 bp, Homo sapiens
  modified_base (11)..(11): a, c, t or g
  modified_base (14)..(14): a, c, t or g
  modified_base (400)..(400): a, c, t or g
  modified_base (461)..(461): a, c, t or g
gacacatttanttntttattatccttcagagtctaaaacttcctcgtgatacaacgtatagccacccattccagcctgcttattggaacttctattcccatctggtggcaaacatttctttttacatttgttttactatcaaagatttagagtcacaataaatacaagtgacagcctccacacccaaagagcctccccaataccctggcactagtgtaaccgtctattacactttaaggattataaaattgtttgctgtccttttttaaaagctcaggtccaagttctttagggttaacgtcatgtgcagcatagctcaggcatcaaaaaccctacgggcagagcaggcaagggatcatcccttctgtgatggggaatatttgtataggggaaggtcttntccccctggcctttaaggtccatagggggagcaggggccacgggggcccaggggggtggcncattggg

SEQ ID NO: 351 - DNA, 334 bp, Homo sapiens
  modified_base (10)..(10): a, c, t or g
  modified_base (14)..(15): a, c, t or g
  modified_base (311)..(311): a, c, t or g
  modified_base (328)..(328): a, c, t or g
atacaggagntaannttaaaaaaaaattcaactgaaaaacacaataacccaaattaaaaactgaatggataggtttaacagcagtttagacacaaagaaaaatttagtgacctaaaatctaaagcaaataaaacaggaaggtatgactcattcaaaggaaaatatttaactgacaaaaacatgcccaaggaagcctagacattggacttagtaaacaaaggctttaaaccgactgtcttaaatgtgctcgaagaactgaaggaagccatgggacacagaactacaggaagtcagggaaaatcacagagggnacacaatgagggtatcnacaggt

SEQ ID NO: 352 - DNA, 269 bp, Homo sapiens
  modified_base (120)..(120): a, c, t or g
  modified_base (215)..(215): a, c, t or g
  modified_base (222)..(222): a, c, t or g
  modified_base (250)..(250): a, c, t or g
  modified_base (257)..(257): a, c, t or g
acaagaacctcatatttttcattttatactaggtctcacacattacctgcccagtcctgcataatcaatcacacatattagtgtgaactaatagctacatcataaatttgattataaagnataacacatactctgaatatgaaccagctacagcaaatagacactttcaacttgctactaaaaatggaagctcaccagctattttaaagtttttnggggccncttttaatgaagaaatgcttgggaaagntaagggncaaaggataact

SEQ ID NO: 353 - DNA, 183 bp, Homo sapiens
  modified_base (1)..(1): a, c, t or g
natgaaataaagcctgatggttatttccttgaatgtattccatcctgtagccaatactggtttatacccctcgtttgtttaaaaagtaaatggatgacttagatgatttagatttagatttcacacatttttctcctagcttttaaaaagtactttctattaaagctgtcataacaaatgacc

SEQ ID NO: 354 - DNA, 2213 bp, Homo sapiens
gggcgtgcaaaggcgcggagcgggacggaaaccacaaataaatagcggcggcggcagcgcgtcatctggtggagcaggaagtgcaggcagagtccggaggctggtgctttctgcgcgtccccaggactttgccatgggctgggggccgcggaggctgcgagcggccgggcgagggcagcggcggcggcgtccccaccggggctgagcgagcagcgacgcgaggggcgcgcggagatggcagcgtccagcaactccagcctgtccggctcgtcggtgtcctccgatgctgaagaataccagcctcctatatggaaatcatacttatatcagttacagcaagaggcacctcgtcccaagagaatcatttgtcctcgggaggtggaaaacagaccaaaatattatggaagagagtttcatgggatcatctctcgggagcaggcggatgagcttcttggaggcgtggagggtgcctacatccttagagaaagccagcggcaaccaggatgctacacgctggctctcaggtttggaaaccagaccttaaactacaggctcttccacgacgggaaacactttgtgggtgagaagaggtttgagtcgattcatgatctggtgacagatggcttgataacactgtacatagaaacaaaagctgccgagtacatttcaaaaatgacaactaaccccatctatgaacacattggatatgccaccctactcagagaaaaagtatccagaaggctgagcaggtctaaaaatgaaccaagaaaaacaaacgtcacacatgaagaacacacagcggtggaaaagatctcctccctggttcgaagggctgccctcacacacaacgacaaccacttcaattatgagaagacacacaactttaaggtccacacgttccgaggcccacactggtgtgaatattgtgccaatttcatgtgggggctcatcgcccaaggggtccggtgctcagactgtggattgaacgtacacaaacagtgttccaagcacgttcccaatgactgccaacctgatctcaagaggatcaagaaagtgtactgttgtgacctcacaacacttgtgaaggctcacaacactcagagacccatggtggtagacatatgcattcgggaaattgaagcaagaggattaaaatcggaaggcctttacagagtctctgggttcactgaacacattgaagatgtcaaaatggcatttgacagagatggtgaaaaggccgatatatctgccaatgtctatccagacataaacatcatcactggagcccttaaactgtatttcagagacttacccatccctgtcatcacatatgatacctattccaaatttatagatgcagcaaaaatctccaatgcagatgagaggctggaagccgtccatgaagtgctgatgctgctgcctcctgcccactatgaaaccctccggtacctaatgatccacctcaaaaaggttactatgaatgaaaaagacaatttcatgaatgcagaaaatctggggatcgtgtttgggcccactctgatgaggccccctgaggacagcaccctgaccaccctgcatgatatgcggtaccaaaagctgattgtgcagattttaatagaaaacgaagacgttttattctaatccatcagggaaatgagctgaatggcccagcaccatcaagttgacacagctaaggataaaacatttcttaccacttgatttgttttccaagcaagtgctagaatttgctggactgcagaggatcgctgagtggggtactgtgtctcatagacatgcgccacctccacgtgagaacaagggtgaaggtgagggaagcccctcaggttgggtcttttgctgtgcctcctatgtatgtctggtttgctggaagagtgattaatacatctttaatttattaaaaaacaatgtagacctttaaacttcagtcttattgggaataaaagggaacttaattcatacaggtacttgatacagttatacattttccacttacaaaaagaagacaattctgttaaatgaaacgtgtatcgtaaaatgtaattttatttacccacgagaatgttgttattttagcaatagaactcaatgcagatgcattggttattaccctgtgtaccttgtccctcattttgctgtgacaccctgaaaaagctgaccacaaatgcagtattatcattgacatacctctgtcc

SEQ ID NO: 355 - DNA, 188 bp, Homo sapiens
  modified_base (9)..(10): a, c, t or g
  modified_base (121)..(121): a, c, t or g
  modified_base (149)..(149): a, c, t or g
  modified_base (169)..(169): a, c, t or g
  modified_base (179)..(179): a, c, t or g
gtataacannaaaaaatttattgaaattaaggtttgtagcaaatatatctgatattagaacatttgaaagagatagagacagattcattttcattaagcagcacataaaaaatggactganttggattacattgatgccagtctaggtntacacacactaaagttggtntgaggaaatnttctgaagt

SEQ ID NO: 356 - DNA, 309 bp, Homo sapiens
  modified_base (2)..(2): a, c, t or g
  modified_base (157)..(157): a, c, t or g
  modified_base (236)..(236): a, c, t or g
  modified_base (264)..(264): a, c, t or g
  modified_base (303)..(303): a, c, t or g
gngggggacaattcagttcactgatgaaattgctggatcactgccagcctttggtcctgacacccaatcagagctgcccacatcttttgctgttataacagaggatgctactttgagtccagaacttcctcctgttgaaccccagcttgagacagtngacggagcagagcatggtctacctgacacttcttggtctccacctgctatggcctctacctccctttcagaagcttcanctttctttatggcatcaagcatcttctntctgactgatcaaggcaccacagatacaatggccactgnccagac

SEQ ID NO: 357 - DNA, 3268 bp, Homo sapiens
taaaccaagaaggttatcctcaatcatctggtatcaatatataattatttttcacatttctgttactttttaatgagatttgaggttgttctgtgattgttatcagaattaccaatgcacaaaagccagaatgtatttggaaactagaagagctatttttgttttttggatttttctccaagttcaaggaaccaaagatatctccattaacatataccattctgaaactaaagacatagacaatcccccaagaaatgaaacaactgaaagtactgaaaaaatgtacaaaatgtcaactatgagacgaatattcgatttggcaaagcatcgaacaaaaagatccgcatttttcccaacgggggttaaagtctgtccacaggaatccatgaaacagattttagacagtcttcaagcttattatagattgagagtgtgtcaggaagcagtatgggaagcatatcggatctttctggatcgcatccctgacacaggggaatatcaggactgggtcagcatctgccagcaggagaccttctgcctctttgacattggaaaaaacttcagcaattcccaggagcacctggatcttctccagcagagaataaaacagagaagtttccctgacagaaaagatgaaatatctgcagagaagacattgggagagcctggtgaaaccattgtcatttcaacagatgttgccaacgtctcacttgggcctttccctctcactcctgatgacaccctcctcaatgaaattctcgataatacactcaacgacaccaagatgcctacaacagaaagagaaacagaattcgctgtgttggaggagcagagggtggagctcagcgtctctctggtaaaccagaagttcaaggcagagctcgctgactcccagtccccatattaccaggagctagcaggaaagtcccaacttcagatgcaaaagatatttaagaaacttccaggattcaaaaaaatccatgtgttaggatttagaccaaagaaagaaaaagatggctcaagctccacagagatgcaacttacggccatctttaagagacacagtgcagaagcaaaaagccctgcaagtgacctcctgtcttttgattccaacaaaattgaaagtgaggaagtctatcatggaaccatggaggaggacaagcaaccagaaatctatctcacagctacagacctcaaaaggctgatcagcaaagcactagaggaagaacaatctttggatgtggggacaattcagttcactgatgaaattgctggatcactgccagcctttggtcctgacacccaatcagagctgcccacatcttttgctgttataacagaggatgctactttgagtccagaacttcctcctgttgaaccccagcttgagacagtggacggagcagagcatggtctacctgacacttcttggtctccacctgctatggcctctacctccctgtcagaagctccacctttctttatggcatcaagcatcttctctctgactgatcaaggcaccacagatacaatggccactgaccagacaatgctagtaccagggctcaccatccccaccagtgattattctgcaatcagccaactggctctgggaatttcacatccacctgcatcttcagatgacagccgatcaagtgcaggtggcgaagatatggtcagacacctagatgaaatggatctgtctgacactcctgccccatctgaggtaccagagctcagcgaatatgtttctgtcccagatcatttcttggaggataccactcctgtctcagctttacagtatatcaccactagttctatgaccattgcccccaagggccgagagctggtagtgttcttcagtctgcgtgttgctaacatggccttctccaacgacctgttcaacaagagctctctggagtaccgagctctggagcaacaattcacacagctgctggttccatatctacgatccaatcttacaggatttaagcaacttgaaatacttaacttcagaaacgggagtgtgattgtgaatagcaaaatgaagtttgctaagtctgtgccgtataacctcaccaaggctgtgcacggggtcttggaggattttcgttctgctgcagcccaacaactccatctggaaatagacagctactctctcaacattgaaccagctgatcaagcagatccctgcaagttcctggcctgcggcgaatttgcccaatgtgtaaagaacgaacggactgaggaagcggagtgtcgctgcaaaccaggatatgacagccaggggagcctggacggtctggaaccaggcctctgtggccctggcacaaaggaatgcgaggtcctccagggaaagggagctccatgcaggttgccagatcactctgaaaatcaagcatacaaaactagtgttaaaaagttccaaaatcaacaaaataacaaggtaatcagtaaaagaaattctgaattactgaccgtagaatatgaagaatttaaccatcaagattgggaaggaaattaaaaactgaaaatgtacaattatcacttaggctatctcaagagagatgatttgccttctcaaggaaaatggagacaggcatattcatgggtcatcaaaatccagacatacagtcaacactgagaatcagcacacaccatatttcaaatatagaagagtcatgtacttggcaaccagtaaattctgaaaaaaaagacacttacttattattaaaaccccaaatgcaatcagcgaaacatatttttactattcttggatgatagtcaaaatgatcataagccaggtttgcttccaccttccctgaaaattttactcacagatcatttgcaacaagcatagcttacttattgtttagggactgaacaatttattgggaagcaaactctttatatgctagaaagtacatttaaaagatgactacttacgcagggagatgcaggtctctctaaacgcatgaatgtatgtagtgtgtaggcactgtagtgagtgtatatatgctccacactacgtctgataaacacaaacctcagtattcagttattaggcacactagttttatacgcaactactgcttacatagtagactgttttgttgccaataatctttgaattgttctttaaaagaaactgaggttcagatacacataccatggaaaaatcttacttttcttgttactacacaaagctattttaaagaagatgctatgttgggagaagggcgaagttgtactatatgacataatcaat

SEQ ID NO: 358 - DNA, 424 bp, Homo sapiens
gacatagatacttatttatttgcatatttaaagtttacacacatgctatgactccaatgttttaaaaaaataagcccttaacagctctgagacacatggcctcttctgtatcccaagcaaatccctaaatggaggagagcacgtgttcctatttttcacactctcatatgggagataagtggttaaggaggactagaaacccaatcaggcctaccggggtgccggacagacacacagcattcctaaaggaatgccaccagagaaaaaatacaagtctgtacatatatctttattttcatacttaaaaagaatcacatactcattccaacagctttaccaggcttcgccaacccaataagttacacactcactcaggtactaggaaggttattgcacagctccttaactgatcggggtcagggca

SEQ ID NO: 359 - DNA, 393 bp, Homo sapiens
  modified_base (2)..(2): a, c, t or g
  modified_base (5)..(5): a, c, t or g
  modified_base (7)..(8): a, c, t or g
  modified_base (155)..(155): a, c, t or g
  modified_base (235)..(235): a, c, t or g
  modified_base (245)..(245): a, c, t or g
  modified_base (249)..(249): a, c, t or g
  modified_base (300)..(300): a, c, t or g
  modified_base (344)..(344): a, c, t or g
  modified_base (379)..(379): a, c, t or g
gnatntnnataatcatttgtttttctaaatcagtctataaaagaacaaaacttttaaaatcttgcagaggctgtttcatcagtaaactctcctagggagctactactgctgtctaaacctctgtgaaatggtaggcaaaaaaagccatcaaaggntcacaggagataaaacaccaatcagtgtaagctgttaaagatgactgtgattaaataaccaaatatcaaatatccaatanggtaattaantttnggattaaaaaaaaactaaggcaccaggctgttacatacattattaaatgtnctaatctctttcctgattcataggccatattctacatggatggntccaagggctgtccactgtggctacctacccttcnttttaaacactggc

SEQ ID NO: 360 - DNA, 457 bp, Homo sapiens
  modified_base (1)..(1): a, c, t or g
  modified_base (360)..(360): a, c, t or g
  modified_base (379)..(379): a, c, t or g
  modified_base (386)..(386): a, c, t or g
  modified_base (431)..(431): a, c, t or g
  modified_base (436)..(436): a, c, t or g
ngagaatgttaaagcaggccgtgataagtacaagactctgcgacagattcgacaaggcaatacaaagcagcgtatcgatgagtttgaagcaatgtgagagctgttattttgcatatatgttcttcataagctgaaccaccaacagagaaaagcaggcctttgcagatatgatggaatgcatcccaccttgccaaagcacttacaccagtttgactgtgctagctaaaagacaaatttaaggggagctcttcaacattaagggcagtatgatatcatgcttggttttcttttttcttttggtccaggggaatggagaatggtgttccattgcctctttttcacattttttttctttttctnttttttttctgttgaaggnttaacantaattatccacgtctggacaaatgtgtaagtgtgggttcagttcngtgtnacattttaaagggtaatgggg

SEQ ID NO: 361 - DNA, 4498 bp, Homo sapiens
ttggcgctcagtccgcggcgcgaggacggccggccggcagggggaggcgggggggcgccgggcagccccgccttttcccgcggaggcgccgagcggccatattgcggagctgtctgcggtggcggcggcgcctctcgtctcccgcggcccagcgctcgcaccaccgcttctccctccctgtcgcagccgcgccgccgcgcagcgccccagccacacgccggcgggcagaagccgcccgctctccggaaagtgataacagaattcattgaagtggagaatttttaaagaaggtaacaaaaagagaaagaaaatgccgaaaccaatcaacgtaagagtaactacaatggatgctgagctggaatttgccattcagcccaatacaactggcaaacaactttttgaccaggtggtgaaaacagttggtttgcgtgaggtctggttttttgggctgcagtatgtagacagcaaaggttattctacatggcttaaactaaataaaaaggtaacacagcaggatgttaaaaaagagaatcctttacagttcaagtttagagctaaattctttcctgaagatgtttctgaggaattaattcaagaaataacccagagactcttcttcttgcaagttaaagaagccatcttaaatgatgagatatattgcccgccagaaactgcagttcttttggcttcctatgctgtccaagccaagtatggagattacaataaagagattcataagccaggctacctggctaatgatagactcctaccccagcgtgtattggaacaacacaaactaacaaaagaacagtgggaagaaagaatacagaactggcatgaagaacatagaggaatgttaagggaggattctatgatggaatacctgaagattgcacaagatctagaaatgtatggagtcaactattttgaaataaaaaataaaaaaggaactgaattgtggctaggtgttgatgctttgggtctgaatatttatgagcatgacgacaagttaacacctaaaattggttttccctggagtgaaatcagaaatatttcatttaatgacaaaaaatttgttataaagccaatcgacaaaaaggcacctgattttgtgttttatgcacctcgtctgagaatcaataagcggattttggccttatgtatgggaaaccatgaactatacatgcgaagaaggaagcctgatactattgaagtacaacagatgaaggctcaggctagggaggagaaacatcagaagcagttggaaagggcacaattagagaatgaaaagaagaaaagagaaatagcagaaaaggaaaaggaaagaatagaacgtgaaaaggaagagctaatggaacgtctaaaacaaattgaagagcagacaattaaagctcagaaagaactagaagaacagactcgaaaagctctagaactggatcaagaacgaaaacgagcaaaagaagaagcagaacgacttgaaaaggagcgtcgagctgctgaagaggcaaagtctgccatagcaaaacaagctgccgaccagatgaagaatcaggagcagctagcagcagaacttgctgaattcactgccaagattgcacttctagaggaagccaagaagaaaaaggaagaggaagctactgagtggcaacacaaagcttttgcagcccaggaagacttggaaaagaccaaagaagagttaaaaactgtgatgtctgccccccctccacctccaccaccaccagtcattcctccaacagaaaacgaacatgatgaacacgatgagaataatgctgaagctagtgctgaattatcaaatgaaggggtaatgaaccatagaagcgaggaagaacgtgtaaccgaaacacagaaaaatgagcgtgttaagaagcaacttcaggcattaagttcagaattagcccaagccagagatgaaaccaagaaaacacaaaatgatgttcttcatgctgagaatgttaaagcaggccgtgataagtacaagactctgcgacagattcgacaaggcaatacaaagcagcgtatcgatgagtttgaagcaatgtgagagctgttattttgcatatatgttcttcataagctgaaccaccaacagagaaaagcaggcctttgcagatatgatggaatgcatcccaccttgccaaagcacttacaccagtttgactgtgctagctaaaagacaaatttaaggggagctcttcaacattaaggcagtatgatatcatgcttggttttcttttttcttttggtccagggaatggagaatggtgttccattgcctcttttcacattttttttctttttcttttttttttctgttgaagattaacactaattatcacgtctgacaaatgtgtatgtgtggtttcagttctgtgtacattttaaaggataatggtgaacattttaatgggtttcccttgccctttccatatttaacctatttccacattctctctcactcacattttctcagtgtgcccttctcttatctgccatgtccatagccataattccaccatcatacagatcaggcagtgtttaaaatgatggtaggtagcacagtggacagtctttgatcatcatgtagaatatggctatgaatcaggaaagagattagaacatttaataatgtatgtacagctggtgcttagtttttttttaatctaaatttaattaccttattggatatttgatatttggttatttaatcacagtcatctttaacagcttacactgattggtgttttatctcctgtgatcctttgatggctttttttgcctaccatttcacagaggtttagacagcagtagtagctccctaggagagtttactgatgaaacagcctctgcaagattttaaaagttttgttcttttatagactgatttagaaaaacaaatgattagttaaaaaaagaaaatatacatttgttggtaactaatgttattttttaaaacctggaccttttctggaagggcagcatataaaaacatcagtcccgaggaggggacaacaatactacctcactactacatctgtgatgactggttgttcaaacacaatggagtgtgtaaggtatatgttttataattcataaccatagcctcgatcatcaagaaatactttcgaaatttcattttccttcagaatatcttaagagtgctaaatttttaactgcctttttgtcgagtcaaactgtgggattctgatttgtattaaaattgtaagctcctcactggtatactatcatcctggaggggtgttgtatggctgagcaagagagagagagaatgagagagagactgtgtgtgtgtgtgtgtgtgtgtgtgtgtgtactctgtgtgtgtatgagagagagaaatgctaaccttgtagcatgtgaagaatgtctgtaccttgatacgatagttacataatcagtatatttggtttctagatcactgtgcttattttgtttcaatctctgactaaaaatacttaaatttggtttgttaattcttattttagaaattataattttagtttatattaatttcggttatagcttactgaagaaatctttccagttagaaggaggttctaatattcacatgttctaatactttgtttattgtaaaacagctaaatttggagatacgtaaagccttgttttctctgtgtggttcagctactttccatttggtattacacagtcaaatttacatttatctattaaaattgccattttattaaacattttcatgcacagtagattcaagttgtgtctgaaaatatctcttgtgcttttttgattttgctgactttaaaaggattaatctgggcagacattatgtaaaagaaaggttgcgtttaatatattttttgaactttgtaggacaaaacatagctggttaaccttgaagtgactgttgtaccatggttgtgcacatgcttcagaatcctatggaagagaatattcctacttgcagtacatcaaaggaatggatggtggaccctactattcatgttttgagacataaatgttcactttaaagcaattgcataatagataaaaacctgaactttcattggatttttgttaattttcctcattttgaattatgtgcactaccatagctacatcagtttgatacagtattgaaaaattatcagttatattttgctgtttatgatctatttgtagattaggattaaaatggatttaatccatttttaaggctgtgtgaatttttctaaacaagaaccatttgcaatatggatttcttagagattaaaccaattataacttattagcagtcgcgagcacatgttcatatagtcaatgtaaaaatacactaatgagtatttggtaaatcccagtaggcttttaccattagcataattttgtgttgtacaattaagttacaattacatctctaattttggataatattcattggttaacaataaagtgacaaaagctcatgccttcaaaaaaaaaa

SEQ ID NO: 362 - DNA, 187 bp, Homo sapiens
  modified_base (2)..(2): a, c, t or g
  modified_base (4)..(4): a, c, t or g
  modified_base (106)..(106): a, c, t or g
  modified_base (121)..(121): a, c, t or g
  modified_base (184)..(184): a, c, t or g
antntattgtttttcaatgttctttaataaaatgacatcaattgctgaaagatttatgacctttgttatgctacataatactgatacaaaatgtgaatagtacaangttcattatatatanggctttaatatattacatttgtttctacataaacagactataaatatatgtgccatagcatgnctt

SEQ ID NO: 363 - DNA, 432 bp, Homo sapiens
  modified_base (65)..(65): a, c, t or g
  modified_base (105)..(105): a, c, t or g
  modified_base (236)..(236): a, c, t or g
  modified_base (358)..(358): a, c, t or g
  modified_base (392)..(392): a, c, t or g
tccaccagcaggaaagtagccgcatttgattttcatttcgacaacagaaaaaggacctcggactncagggagccagtcttctaggcatatcctggaagaggcttntgacccaagaatgtgtctgtgtcttctcccagtgttgacctgatcctctttttcattcatttaaaaagcatttatcatgccccctgctgcgggtctcaccatgggtttagaacaaagacgttcaagaaatnggccccatcctcaaagaagtagcagtacctgggggagctgacacttcttgtaaaactagaagataaaccagggcaatgtaagtgttcgaggtgttgaagatgggaaggattttgcagggctnagtctattccaagaggcttttgttttaggacgtngggtcccaagccaagccttaaagtttgggaatttcggatt

SEQ ID NO: 364 - DNA, 5830 bp, Homo sapiens
actgagtcccgggaccccgggagagcggtcagtgtgtggtcgctgcgtttcctctgcctgcgccgggcatcacttgcgcgccgcagaaagtccgtctggcagcctggatatcctctcctaccggcacccgcagacgcccctgcagccgccggtcggcgcccgggctccctagccctgtgcgctcaactgtcctgcgctgcggggtgccgcgagttccacctccgcgcctccttctctagacaggcgctgggagaaagaaccggctcccgagttctgggcatttcgcccggctcgaggtgcaggatgcagagcaaggtgctgctggccgtcgccctgtggctctgcgtggagacccgggccgcctctgtgggtttgcctagtgtttctcttgatctgcccaggctcagcatacaaaaagacatacttacaattaaggctaatacaactcttcaaattacttgcaggggacagagggacttggactggctttggcccaataatcagagtggcagtgagcaaagggtggaggtgactgagtgcagcgatggcctcttctgtaagacactcacaattccaaaagtgatcggaaatgacactggagcctacaagtgcttctaccgggaaactgacttggcctcggtcatttatgtctatgttcaagattacagatctccatttattgcttctgttagtgaccaacatggagtcgtgtacattactgagaacaaaaacaaaactgtggtgattccatgtctcgggtccatttcaaatctcaacgtgtcactttgtgcaagatacccagaaaagagatttgttcctgatggtaacagaatttcctgggacagcaagaagggctttactattcccagctacatgatcagctatgctggcatggtcttctgtgaagcaaaaattaatgatgaaagttaccagtctattatgtacatagttgtcgttgtagggtataggatttatgatgtggttctgagtccgtctcatggaattgaactatctgttggagaaaagcttgtcttaaattgtacagcaagaactgaactaaatgtggggattgacttcaactgggaatacccttcttcgaagcatcagcataagaaacttgtaaaccgagacctaaaaacccagtctgggagtgagatgaagaaatttttgagcaccttaactatagatggtgtaacccggagtgaccaaggattgtacacctgtgcagcatccagtgggctgatgaccaagaagaacagcacatttgtcagggtccatgaaaaaccttttgttgcttttggaagtggcatggaatctctggtggaagccacggtgggggagcgtgtcagaatccctgcgaagtaccttggttacccacccccagaaataaaatggtataaaaatggaataccccttgagtccaatcacacaattaaagcggggcatgtactgacgattatggaagtgagtgaaagagacacaggaaattacactgtcatccttaccaatcccatttcaaaggagaagcagagccatgtggtctctctggttgtgtatgtcccaccccagattggtgagaaatctctaatctctcctgtggattcctaccagtacggcaccactcaaacgctgacatgtacggtctatgccattcctcccccgcatcacatccactggtattggcagttggaggaagagtgcgccaacgagcccagccaagctgtctcagtgacaaacccatacccttgtgaagaatggagaagtgtggaggacttccagggaggaaataaaattgaagttaataaaaatcaatttgctctaattgaaggaaaaaacaaaactgtaagtacccttgttatccaagcggcaaatgtgtcagctttgtacaaatgtgaagcggtcaacaaagtcgggagaggagagagggtgatctccttccacgtgaccaggggtcctgaaattactttgcaacctgacatgcagcccactgagcaggagagcgtgtctttgtggtgcactgcagacagatctacgtttgagaacctcacatggtacaagcttggcccacagcctctgccaatccatgtgggagagttgcccacacctgtttgcaagaacttggatactctttggaaattgaatgccaccatgttctctaatagcacaaatgacattttgatcatggagcttaagaatgcatccttgcaggaccaaggagactatgtctgccttgctcaagacaggaagaccaagaaaagacattgcgtggtcaggcagctcacagtcctagagcgtgtggcacccacgatcacaggaaacctggagaatcagacgacaagtattggggaaagcatcgaagtctcatgcacggcatctgggaatccccctccacagatcatgtggtttaaagataatgagacccttgtagaagactcaggcattgtattgaaggatgggaaccggaacctcactatccgcagagtgaggaaggaggacgaaggcctctacacctgccaggcatgcagtgttcttggctgtgcaaaagtggaggcatttttcataatagaaggtgcccaggaaaagacgaacttggaaatcattattctagtaggcacggcggtgattgccatgttcttctggctacttcttgtcatcatcctacggaccgttaagcgggccaatggaggggaactgaagacaggctacttgtccatcgtcatggatccagatgaactcccattggatgaacattgtgaacgactgccttatgatgccagcaaatgggaattccccagagaccggctgaagctaggtaagcctcttggccgtggtgcctttggccaagtgattgaagcagatgcctttggaattgacaagacagcaacttgcaggacagtagcagtcaaaatgttgaaagaaggagcaacacacagtgagcatcgagctctcatgtctgaactcaagatcctcattcatattggtcaccatctcaatgtggtcaaccttctaggtgcctgtaccaagccaggagggccactcatggtgattgtggaattctgcaaatttggaaacctgtccacttacctgaggagcaagagaaatgaatttgtcccctacaagaccaaaggggcacgattccgtcaagggaaagactacgttggagcaatccctgtggatctgaaacggcgcttggacagcatcaccagtagccagagctcagccagctctggatttgtggaggagaagtccctcagtgatgtagaagaagaggaagctcctgaagatctgtataaggacttcctgaccttggagcatctcatctgttacagcttccaagtggctaagggcatggagttcttggcatcgcgaaagtgtatccacagggacctggcggcacgaaatatcctcttatcggagaagaacgtggttaaaatctgtgactttggcttggcccgggatatttataaagatccagattatgtcagaaaaggagatgctcgcctccctttgaaatggatggccccagaaacaatttttgacagagtgtacacaatccagagtgacgtctggtcttttggtgttttgctgtgggaaatattttccttaggtgcttctccatatcctggggtaaagattgatgaagaattttgtaggcgattgaaagaaggaactagaatgagggcccctgattatactacaccagaaatgtaccagaccatgctggactgctggcacggggagcccagtcagagacccacgttttcagagttggtggaacatttgggaaatctcttgcaagctaatgctcagcaggatggcaaagactacattgttcttccgatatcagagactttgagcatggaagaggattctggactctctctgcctacctcacctgtttcctgtatggaggaggaggaagtatgtgaccccaaattccattatgacaacacagcaggaatcagtcagtatctgcagaacagtaagcgaaagagccggcctgtgagtgtaaaaacatttgaagatatcccgttagaagaaccagaagtaaaagtaatcccagatgacaaccagacggacagtggtatggttcttgcctcagaagagctgaaaactttggaagacagaaccaaattatctccatcttttggtggaatggtgcccagcaaaagcagggagtctgtggcatctgaaggctcaaaccagacaagcggctaccagtccggatatcactccgatgacacagacaccaccgtgtactccagtgaggaagcagaacttttaaagctgatagagattggagtgcaaaccggtagcacagcccagattctccagcctgactcggggaccacactgagctctcctcctgtttaaaaggaagcatccacaccccaactcccggacatcacatgagaggtctgctcagattttgaagtgttgttctttccaccagcaggaagtagccgcatttgattttcatttcgacaacagaaaaaggacctcggactgcagggagccagtcttctaggcatatcctggaagaggcttgtgacccaagaatgtgtctgtgtcttctcccagtgttgacctgatcctcttttttcattcatttaaaaagcattatcatgcccctgctgcgggtctcaccatgggtttagaacaaagagcttcaagcaatggccccatcctcaaagaagtagcagtacctggggagctgacacttctgtaaaactagaagataaaccaggcaacgtaagtgttcgaggtgttgaagatgggaaggatttgcagggctgagtctatccaagaggctttgtttaggacgtgggtcccaagccaagccttaagtgtggaattcggattgatagaaaggaagactaacgttaccttgctttggagagtactggagcctgcaaatgcattgtgtttgctctggtggaggtgggcatggggtctgttctgaaatgtaaagggttcagacggggtttctggttttagaaggttgcgtgttcttcgagttgggctaaagtagagttcgttgtgctgtttctgactcctaatgagagttccttccagaccgttagctgtctccttgccaagccccaggaagaaaatgatgcagctctggctccttgtctcccaggctgatcctttattcagaataccacaaagaaaggacattcagctcaaggctccctgccgtgttgaagagttctgactgcacaaaccagcttctggtttcttctggaatgaataccctcatatctgtcctgatgtgatatgtctgagactgaatgcgggaggttcaatgtgaagctgtgtgtggtgtcaaagtttcaggaaggattttacccttttgttcttccccctgtccccaacccactctcaccccgcaacccatcagtattttagttatttggcctctactccagtaaacctgattgggtttgttcactctctgaatgattattagccagacttcaaaattattttatagcccaaattataacatctattgtattatttagacttttaacatatagagctatttctactgatttttgcccttgttctgtcctttttttcaaaaaagaaaatgtgttttttgtttggtaccatagtgtgaaatgctgggaacaatgactataagacatgctatggcacatatatttatagtctgtttatgtagaaacaaatgtaatatattaaagccttatatataatgaactttgtactattcacattttgtatcagtattatgtagcataacaaaggtcataatgctttcagcaattgatgtcattttattaaagaacattgaaaaacttga

SEQ ID NO: 365 - DNA, 600 bp, Homo sapiens
  modified_base (402)..(402): a, c, t or g
  modified_base (583)..(583): a, c, t or g
tctcatttctctatttttaaaagcgcccagattgctcaaagatagcagaagtaggagattaaaaaaaatctggaaccacaaagttagtagtttcagatgatctggggtttggctgtgtgaggggtggcagaatgcaggtaggcgccttagtcgtatctttctgcagcttccgttctcagctcctcacatgggggaggtagcgcactccgaggtcaactccatgtcaaaggtgagggactcaaactgccctcctgctgagggttcagcaccttcaccattatttccaaactgcatcaatgaatctaaagtgcggggggacatcggcaggtcaatggtattgctgcaggtcgttggtgtcacacagataaacttggtcttcaggtatggggcagcgctacctgngtcagcttcaggatgctcctggctctctggccgacaatactttccgaatgcctcctccttgggaatgtcaggatagagatagaccagtggagacaccaggatattggtagcatccatgatcttatagcccatgatgatttcagcaaatgacatgttgttcagctgctgctttgtgtatggntccacggactggatctg

SEQ ID NO: 366 - DNA, 4978 bp, Homo sapiens
ggtttccggagctgcggcggcgcagactgggagggggagccgggggttccgacgtcgcagccgagggaacaagccccaaccggatcctggacaggcaccccggcttggcgctgtctctccccctcggctcggagaggcccttcggcctgagggagcctcgccgcccgtccccggcacacgcgcagccccggcctctcggcctctgccggagaaacagttgggacccctgattttagcaggatggcccaatggaatcagctacagcagcttgacacacggtacctggagcagctccatcagctctacagtgacagcttcccaatggagctgcggcagtttctggccccttggattgagagtcaagattgggcatatgcggccagcaaagaatcacatgccactttggtgtttcataatctcctgggagagattgaccagcagtatagccgcttcctgcaagagtcgaatgttctctatcagcacaatctacgaagaatcaagcagtttcttcagagcaggtatcttgagaagccaatggagattgcccggattgtggcccggtgcctgtgggaagaatcacgccttctacagactgcagccactgcggcccagcaagggggccaggccaaccaccccacagcagccgtggtgacggagaagcagcagatgctggagcagcaccttcaggatgtccggaagagagtgcaggatctagaacagaaaatgaaagtggtagagaatctccaggatgactttgatttcaactataaaaccctcaagagtcaaggagacatgcaagatctgaatggaaacaaccagtcagtgaccaggcagaagatgcagcagctggaacagatgctcactgcgctggaccagatgcggagaagcatcgtgagtgagctggcggggcttttgtcagcgatggagtacgtgcagaaaactctcacggacgaggagctggctgactggaagaggcggcaacagattgcctgcattggaggcccgcccaacatctgcctagatcggctagaaaactggataacgtcattagcagaatctcaacttcagacccgtcaacaaattaagaaactggaggagttgcagcaaaaagtttcctacaaaggggaccccattgtacagcaccggccgatgctggaggagagaatcgtggagctgtttagaaacttaatgaaaagtgcctttgtggtggagcggcagccctgcatgcccatgcatcctgaccggcccctcgtcatcaagaccggcgtccagttcactactaaagtcaggttgctggtcaaattccctgagttgaattatcagcttaaaattaaagtgtgcattgacaaagactctggggacgttgcagctctcagaggatcccggaaatttaacattctgggcacaaacacaaaagtgatgaacatggaagaatccaacaacggcagcctctctgcagaattcaaacacttgaccctgagggagcagagatgtgggaatgggggccgagccaattgtgatgcttccctgattgtgactgaggagctgcacctgatcacctttgagaccgaggtgtatcaccaaggcctcaagattgacctagagacccactccttgccagttgtggtgatctccaacatctgtcagatgccaaatgcctgggcgtccatcctgtggtacaacatgctgaccaacaatcccaagaatgtaaacttttttaccaagcccccaattggaacctgggatcaagtggccgaggtcctgagctggcagttctcctccaccaccaagcgaggactgagcatcgagcagctgactacactggcagagaaactcttgggacctggtgtgaattattcagggtgtcagatcacatgggctaaattttgcaaagaaaacatggctggcaagggcttctccttctgggtctggctggacaatatcattgaccttgtgaaaaagtacatcctggccctttggaacgaagggtacatcatgggctttatcagtaaggagcgggagcgggccatcttgagcactaagcctccaggcaccttcctgctaagattcagtgaaagcagcaaagaaggaggcgtcactttcacttgggtggagaaggacatcagcggtaagacccagatccagtccgtggaaccatacacaaagcagcagctgaacaacatgtcatttgctgaaatcatcatgggctataagatcatggatgctaccaatatcctggtgtctccactggtctatctctatcctgacattcccaaggaggaggcattcggaaagtattgtcggccagagagccaggagcatcctgaagctgacccaggtagcgctgccccatacctgaagaccaagtttatctgtgtgacaccaacgacctgcagcaataccattgacctgccgatgtccccccgcactttagattcattgatgcagtttggaaataatggtgaaggtgctgaaccctcagcaggagggcagtttgagtccctcacctttgacatggagttgacctcggagtgcgctacctcccccatgtgaggagctgagaacggaagctgcagaaagatacgactgaggcgcctacctgcattctgccacccctcacacagccaaaccccagatcatctgaaactactaactttgtggttccagattttttttaatctcctacttctgctatctttgagcaatctgggcacttttaaaaatagagaaatgagtgaatgtgggtgatctgcttttatctaaatgcaaataaggatgtgttctctgagacccatgatcaggggatgtggcggggggtggctagagggagaaaaaggaaatgtcttgtgttgttttgttcccctgccctcctttctcagcagctttttgttattgttgttgttgttcttagacaagtgcctcctggtgcctgcggcatccttctgcctgtttctgtaagcaaatgccacaggccacctatagctacatactcctggcattgcactttttaaccttgctgacatccaaatagaagataggactatctaagccctaggtttctttttaaattaagaaataataacaattaaagggcaaaaaacactgtatcagcatagcctttctgtatttaagaaacttaagcagccgggcatggtggctcacgcctgtaatcccagcactttgggaggccgaggcggatcataaggtcaggagatcaagaccatcctggctaacacggtgaaaccccgtctctactaaaagtacaaaaaattagctgggtgtggtggtgggcgcctgtagtcccagctactcgggaggctgaggcaggagaatcgcttgaacctgagaggcggaggttgcagtgagccaaaattgcaccactgcacactgcactccatcctgggcgacagtctgagactctgtctcaaaaaaaaaaaaaaaaaaaagaaacttcagttaacagcctccttggtgctttaagcattcagcttccttcaggctggtaatttatataatccctgaaacgggcttcaggtcaaacccttaagacatctgaagctgcaacctggcctttggtgttgaaataggaaggtttaaggagaatctaagcattttagacttttttttataaatagacttattttcctttgtaatgtattggccttttagtgagtaaggctgggcagagggtgcttacaaccttgactccctttctccctggacttgatctgctgtttcagaggctaggttgtttctgtgggtgccttatcagggctgggatacttctgattctggcttccttcctgccccaccctcccgaccccagtccccctgatcctgctagaggcatgtctccttgcgtgtctaaaggtccctcatcctgtttgttttaggaatcctggtctcaggacctcatggaagaagagggggagagagttacaggttggacatgatgcacactatggggccccagcgacgtgtctggttgagctcagggaatatggttcttagccagtttcttggtgatatccagtggcacttgtaatggcgtcttcattcagttcatgcagggcaaaggcttactgataaacttgagtctgccctcgtatgagggtgtatacctggcctccctctgaggctggtgactcctccctgctggggccccacaggtgaggcagaacagctagagggcctccccgcctgcccgccttggctggctagctcgcctctcctgtgcgtatgggaacacctagcacgtgctggatgggctgcctctgactcagaggcatggccggatttggcaactcaaaaccaccttgcctcagctgatcagagtttctgtggaattctgtttgttaaatcaaattagctggtctctgaattaagggggagacgaccttctctaagatgaacagggttcgccccagtcctcctgcctggagacagttgatgtgtcatgcagagctcttacttctccagcaacactcttcagtacataataagcttaactgataaacagaatatttagaaaggtgagacttgggcttaccattgggtttaaatcatagggacctagggcgagggttcagggcttctctggagcagatattgtcaagttcatggccttaggtagcatgtatctggtcttaactctgattgtagcaaaagttctgagaggagctgagccctgttgtggcccattaaagaacagggtcctcaggccctgcccgcttcctgtccactgccccctccccatccccagcccagccgagggaatcccgtgggttgcttacctacctataaggtggtttataagctgctgtcctggccactgcattcaaattccaatgtgtacttcatagtgtaaaaatttatattattgtgaggttttttgtcttttttttttttttttttttttggtatattgctgtatctactttaacttccagaaataaacgttatataggaaccgtaaaaa

SEQ ID NO: 367 - DNA, 394 bp, Homo sapiens
  modified_base (20)..(20): a, c, t or g
  modified_base (27)..(27): a, c, t or g
  modified_base (30)..(30): a, c, t or g
  modified_base (79)..(79): a, c, t or g
  modified_base (243)..(243): a, c, t or g
  modified_base (268)..(268): a, c, t or g
  modified_base (326)..(326): a, c, t or g
  modified_base (369)..(369): a, c, t or g
  modified_base (382)..(382): a, c, t or g
cccgcgtgtgtgcgcctaanctcaggnggnccacccgagaccccttgagcaccaaccctagtcccccgcgcggcccctnattcgctccgacaagatgaaagaaacaatcatgaaccagggaaaactcgccaaactgcaggcacaagtgcgcattggtgggaaaggaactgctcgcagaaagaagaaggtggttcatagaacagccacagcagatgacaaaaaacttcagttctccttaaagangttaggggtaaacaatatctctggnattgaagaggtgaatatgtttacaaaccagggaacagtgatccactttaacaaccctnaagttcagggcatctctgggcagcggacactttcaccattacnggccttgctgagncaaagcagctgg

SEQ ID NO: 368 - DNA, 895 bp, Homo sapiens
gccatcttgcgtccccgcgtgtgtgcgcctaatctcaggtggtccacccgagaccccttgagcaccaaccctagtcccccgcgcggccccttattcgctccgacaagatgaaagaaacaatcatgaaccaggaaaaactcgccaaactgcaggcacaagtgcgcattggtgggaaaggaactgctcgcagaaagaagaaggtggttcatagaacagccacagcagatgacaaaaaacttcagttctccttaaagaagttaggggtaaacaatatctctggtattgaagaggtgaatatgtttacaaaccaaggaacagtgatccactttaacaaccctaaagttcaggcatctctggcagcgaacactttcaccattacaggccatgctgagacaaagcagctgacagaaatgctacccagcatcttaaaccagcttggtgcggatagtctgactagtttaaggagactggccgaagctctgcccaaacaatctgtggatggaaaagcaccacttgctactggagaggatgatgatgatgaagttccagatcttgtggagaattttgatgaggcttccaagaatgaggcaaactgaattgagtcaacttctgaagataaaacctgaagaagttactgggagctgctattttatattatgactgctttttaagaaatttttgtttatggatctgataaaatctagatctctaatatttttaagcccaagccccttggacactgcagctcttttcagtttttgcttatacacaattcattctttgcagctaattaagccgaagaagcctgggaatcaagtttgaaacaaagattaataaagttctttgcctagtaaaaaaaaaaaaaaaaaaaaaaataaaaaaaaaaaaaaaaaaa

SEQ ID NO: 369 - DNA, 379 bp, Homo sapiens
  modified_base (132)..(132): a, c, t or g
  modified_base (337)..(337): a, c, t or g
  modified_base (370)..(370): a, c, t or g
cgccgtgtccaacaggagatcgacgacgtgatagggcaggtgcggcgaccagagatgggtgaccaggctcacatgccctacaccactgccgtgattcatgaggtgcagcgctttggggacatcgtcccctgnggtgtgacccatatgacatcccgtgacatcgaagtacagggcttccgcatccctaagggaacgacactcatcaccaacctgtcatcggtgctgaaggatgaggccgtctgggagaagcccttccgcttccaccccgaacacttcctgggatgcccagggccactttgtgaagccggagctttcctggcctttttcagcaggccgncgtgcattgccttcggggagcccctggggccgnattggagct

SEQ ID NO: 370 - DNA, 1673 bp, Homo sapiens
gtgctgagagtgtcctgcctggtcctctgtgcctggtggggtgggggtgccaggtgtgtccagaggagcccatttggtagtgaggcaggtatggggctagaagcactggtgcccctggccgtgatagtggccatcttcctgctcctggtggacctgatgcaccggcgccaacgctgggctgcacgctacccaccaggccccctgccactgcccgggctgggcaacctgctgcatgtggacttccagaacacaccatactgcttcgaccagttgcggcgccgcttcggggacgtgttcagcctgcagctggcctggacgccggtggtcgtgctcaatgggctggcggccgtgcgcgaggcgctggtgacccacggcgaggacaccgccgaccgcccgcctgtgcccatcacccagatcctgggtttcgggccgcgttcccaaggggtgttcctggcgcgctatgggcccgcgtggcgcgagcagaggcgcttctccgtctccaccttgcgcaacttgggcctgggcaagaagtcgctggagcagtgggtgaccgaggaggccgcctgcctttgtgccgccttcgccaaccactccggacgcccctttcgccccaacggtctcttggacaaagccgtgagcaacgtgatcgcctccctcacctgcgggcgccgcttcgagtacgacgaccctcgcttcctcaggctgctggacctagctcaggagggactgaaggaggagtcgggctttctgcgcgaggtgctgaatgctgtccccgtcctcctgcatatcccagcgctggctggcaaggtcctacgcttccaaaaggctttcctgacccagctggatgagctgctaactgagcacaggatgacctgggacccagcccagcccccccgagacctgactgaggccttcctggcagagatggagaaggccaaggggaaccctgagagcagcttcaatgatgagaacctgtgcatagtggtggctgacctgttctctgccgggatggtgaccacctcgaccacgctggcctggggcctcctgctcatgatcctacatccggatgtgcagcgccgtgtccaacaggagatcgacgacgtgatagggcaggtgcggcgaccagagatgggtgaccaggctcacatgccctacaccactgccgtgattcatgaggtgcagcgctttggggacatcgtccccctgggtgtgacccatatgacatcccgtgacatcgaagtacagggcttccgcatccctaagggaacgacactcatcaccaacctgtcatcggtgctgaaggatgaggccgtctgggagaagcccttccgcttccaccccgaacacttcctggatgcccagggccactttgtgaagccggaggccttcctgcctttctcagcaggccgccgtgcatgcctcggggagcccctggcccgcatggagctcttcctcttcttcacctccctgctgcagcacttcagcttctcggtgcccactggacagccccggcccagccaccatggtgtctttgctttcctggtgaccccatccccctatgagctttgtgctgtgccccgctagaatggggtacctagtccccagcctgctccctagccagaggctctaatgtacaataaagcaatgtggtagttccaaaaaaaaaaaaaaaa

SEQ ID NO: 371 - DNA, 339 bp, Homo sapiens
  modified_base (108)..(108): a, c, t or g
  modified_base (173)..(173): a, c, t or g
  modified_base (289)..(289): a, c, t or g
  modified_base (304)..(304): a, c, t or g
  modified_base (335)..(335): a, c, t or g
tcatcacatactttattggacatctcctgtggctggtcactgggatagagtaaccaggaaatgcagtcggccctcatgaatgaacaaaacttacaaccccaggagggnagccagaaactcaattagtggcttagtttccacaacactacgtgctacaaagaggtacagaacanttccaggcaaactaagaacctgccccagcctggaggacaggcatgggggtgagggaacccacaggcaagaagcctcccttaagctgagctcaggactggatgaaatgttcttggtngggcaggagggaaanttccagggcagggaaaacagcagggagtttntggt

SEQ ID NO: 372 - DNA, 474 bp, Homo sapiens
  modified_base (229)..(230): a, c, t or g
  modified_base (345)..(345): a, c, t or g
  modified_base (374)..(374): a, c, t or g
  modified_base (399)..(399): a, c, t or g
  modified_base (404)..(404): a, c, t or g
  modified_base (462)..(462): a, c, t or g
aatattctgtttagtagaaaaatcctttagagttcagctctaaccagaaatcttgctgaagtatgtcagcaccttttctcaccctggtaagtacagtatttcaagagcacgctaagggtggttttcattttacagggctgttgatgatgggttaaaaatgttcatttaagggctacccccgtgtttaatagatgaacaccacttctacacaaccctccttggtactcgnngagggagagatctgacaaatactgcccattcccctaggctgactggatttgagaacaaatacccacccatttccaccatggtatggtaacttctctgagcttcagtttccaagtnaatttccatgtaataggacattcccattnaaatacaagctgtttttactttttncgccncccagggcctgtggggatttgggtcccccagcctttttgggggtttttttacattaanttggtacctacc

SEQ ID NO: 373 - DNA, 430 bp, Homo sapiens
  modified_base (241)..(241): a, c, t or g
  modified_base (341)..(341): a, c, t or g
  modified_base (350)..(350): a, c, t or g
  modified_base (359)..(359): a, c, t or g
  modified_base (369)..(369): a, c, t or g
  modified_base (396)..(396): a, c, t or g
  modified_base (408)..(408): a, c, t or g
  modified_base (428)..(428): a, c, t or g
cttggggcatttgggggtggcttttaatgttgggatgtatgtcaacaccaatggagccactgcttttctggggacaaaagaacagtccctcttcctcaggaaaggtccaatgtgtccacacatctatccccatagccttctatcatgagagagcccctcacagatccagcccactggccagtgacttgctgtgaatgatgccaagtgggagtgtctgtaccctgcccaagtctgtgtgggnttcctatgctctccttctttggccatcacataaatttacaaatataatggcaagcatggtttatatacatgttctttttaaggttaagggaaacctcatncatgggggnaaattaaantaaatttgcntcgtggggcctttcgggtttaaaggcngggggttaaatngggggttgtccccacccctngt

SEQ ID NO: 374 - DNA, 4894 bp, Homo sapiens
cgccgcgggaggcggacgagatgcgagcgcggccgcggccccggccgctctgggcgactgtgctggcgctgggggcgctggcgggcgttggcgtaggagggcccaacatctgtaccacgcgaggtgtgagctcctgccagcagtgcctggctgtgagccccatgtgtgcctggtgctctgatgaggccctgcctctgggctcacctcgctgtgacctgaaggagaatctgctgaaggataactgtgccccagaatccatcgagttcccagtgagtgaggcccgagtactagaggacaggcccctcagcgacaagggctctggagacagctcccaggtcactcaagtcagtccccagaggattgcactccggctccggccagatgattcgaagaatttctccatccaagtgcggcaggtggaggattaccctgtggacatctactacttgatggacctgtcttactccatgaaggatgatctgtggagcatccagaacctgggtaccaagctggccacccagatgcgaaagctcaccagtaacctgcggattggcttcggggcatttgtggacaagcctgtgtcaccatacatgtatatctccccaccagaggccctcgaaaacccctgctatgatatgaagaccacctgcttgcccatgtttggctacaaacacgtgctgacgctaactgaccaggtgacccgcttcaatgaggaagtgaagaagcagagtgtgtcacggaaccgagatgccccagagggtggctttgatgccatcatgcaggctacagtctgtgatgaaaagattggctggaggaatgatgcatcccacttgctggtgtttaccactgatgccaagactcatatagcattggacggaaggctggcaggcattgtccagcctaatgacgggcagtgtcatgttggtagtgacaatcattactctgcctccactaccatggattatccctctttggggctgatgactgagaagctatcccagaaaaacatcaatttgatctttgcagtgactgaaaatgtagtcaatctctatcagaactatagtgagctcatcccagggaccacagttggggttctgtccatggattccagcaatgtcctccagctcattgttgatgcttatgggaaaatccgttctaaagtagagctggaagtgcgtgacctccctgaagagttgtctctatccttcaatgccacctgcctcaacaatgaggtcatccctggcctcaagtcttgtatgggactcaagattggagacacggtgagcttcagcattgaggccaaggtgcgaggctgtccccaggagaaggagaagtcctttaccataaagcccgtgggcttcaaggacagcctgatcgtccaggtcacctttgattgtgactgtgcctgccaggcccaagctgaacctaatagccatcgctgcaacaatggcaatgggacctttgagtgtggggtatgccgttgtgggcctggctggctgggatcccagtgtgagtgctcagaggaggactatcgcccttcccagcaggacgaatgcagcccccgggagggtcagcccgtctgcagccagcggggcgagtgcctctgtggtcaatgtgtctgccacagcagtgactttggcaagatcacgggcaagtactgcgagtgtgacgacttctcctgtgtccgctacaagggggagatgtgctcaggccatggccagtgcagctgtggggactgcctgtgtgactccgactggaccggctactactgcaactgtaccacgcgtactgacacctgcatgtccagcaatgggctgctgtgcagcggccgcggcaagtgtgaatgtggcagctgtgtctgtatccagccgggctcctatggggacacctgtgagaagtgccccacctgcccagatgcctgcacctttaagaaagaatgtgtggagtgtaagaagtttgaccggggagccctacatgacgaaaatacctgcaaccgttactgccgtgacgagattgagtcagtgaaagagcttaaggacactggcaaggatgcagtgaattgtacctataagaatgaggatgactgtgtcgtcagattccagtactatgaagattctagtggaaagtccatcctgtatgtggtagaagagccagagtgtcccaagggccctgacatcctggtggtcctgctctcagtgatgggggccattctgctcattggccttgccgccctgctcatctggaaactcctcatcaccatccacgaccgaaaagaattcgctaaatttgaggaagaacgcgccagagcaaaatgggacacagccaacaacccactgtataaagaggccacgtctaccttcaccaatatcacgtaccggggcacttaatgataagcagtcatcctcagatcattatcagcctgtgccacgattgcaggagtccctgccatcatgtttacagaggacagtatttgtggggagggatttggggctcagagtggggtaggttgggagaatgtcagtatgtggaagtgtgggtctgtgtgtgtgtatgtgggggtctgtgtgtttatgtgtgtgtgttgtgtgtgggagtgtgtaatttaaaattgtgatgtgtcctgataagctgagctccttagcctttgtcccagaatgcctcctgcagggattcttcctgcttagcttgagggtgactatggagctgagcaggtgttcttcattacctcagtgagaagccagctttcctcatcaggccattgtccctgaagagaagggcagggctgaggcctctcattccagaggaagggacaccaagccttggctctaccctgagttcataaatttatggttctcaggcctgactctcagcagctatggtaggaactgctgggcttggcagcccgggtcatctgtacctctgcctcctttcccctccctcaggccgaaggaggagtcagggagagctgaactattagagctgcctgtgccttttgccatcccctcaacccagctatggttctctcgcaagggaagtccttgcaagctaattctttgacctgttgggagtgaggatgtctgggccactcaggggtcattcatggcctgggggatgtaccagcatctcccagttcataatcacaacccttcagatttgccttattggcagctctactctggaggtttgtttagaagaagtgtgtcacccttaggccagcaccatctctttacctcctaattccacaccctcactgctgtagacatttgctatgagctggggatgtctctcatgaccaaatgcttttcctcaaagggagagagtgctattgtagagccagaggtctggccctatgcttccggcctcctgtccctcatccatagcacctccacatacctggccctgtgccttggtgtgctgtatccatccatggggctgattgtatttaccttctacctcttggctgccttgtgaaggaattattcccatgagttggctgggaataagtgccaggatggaatgatgggtcagttgtatcagcacgtgtggcctgttcttctatgggttggacaacctcattttaactcagtctttaatctgagaggccacagtgcaattttattttatttttctcatgatgaggttttcttaacttaaaagaacatgtatataaacatgcttgcattatatttgtaaatttatgtgatggcaaagaaggagagcataggaaaccacacagacttgggcagggtacagacactcccacttggcatcattcacagcaagtcactggccagtggctggatctgtgaggggctctctcatgatagaaggctatggggatagatgtgtggacacattggacctttcctgaggaagagggactgttcttttgtcccagaaaagcagtggctccattggtgttgacatacatccaacattaaaagccacccccaaatgcccaagaaaaaaagaaagacttatcaacatttgttccatgagcagaaaactggagctctggcctcagtgttacagctaaataatctttaattaaggcaagtcactttcttcttcttaaagctgttttctagtttgagaaatgatgggattttagcagccagtcttgaaggtctctttcagtatcaacattctaagatgctgggacttactgtgtcatcaaatgtgcggttaagattctctgggatattgatactgtttgtgtttttagttgggagatctgagagacctggctttggcaagagcagatgtcattccatatcacctttctcaatgaaagtctcattctatcctctctccaaacccgttttccaacatttgttaatagttacgtctctcctgatgtagcacttaagcttcatttagttattatttctttcttcactttgcacacatttgcatccacatattagggaagaggaatccataagtagctgaaatatctattctgtattattgtgttaacattgagaataagccttggaattagatatggggcaatgactgagccctgtctcacccatggattactccttactgtagggaatggcagtatggtagagggataaatagggggcggggagggatagtcatggatccaagaagtccttagaaatagtggcagggaacaggtgtggaagctcatgcctgtaattataaccttcagctactaagacaggtgtggtggctcacgcctgtgattataatcttcagttactaagacagagtccatgagagtgttaatgggacattttctttagataagatgttttatatgaagaaactgtatcaaagggggaagaaaatgtatttaacaggtgaatcaaatcaggaatcttgtctgagctactggaatgaagttcacaggtcttgaagacca

SEQ ID NO: 375 - DNA, 419 bp, Homo sapiens
ttttttttttttttttttttaaaaaagcaattcaaacctaattcttccctttcttcctcctcccacccaacccgcctgcttctcaagatgagccttggcaacatagggagatgctggctttttcttttcttttttttttaaaaagcaattcaaacctaattcttccctttcttcctcctcccacccaacccgcctgcttctcaggggcaacaaactcaagttgctcatcatgctaccttgcacatatctacaagacaccatttacttcctaactgccttgacatctgcatgctacggtgctcagctgtttgacatcaacataaatatattctaaatccactggaactagactttttgtactttcatactctgaagaaagtcttaataaatactttattattaagcataattattcatct

SEQ ID NO: 376 - DNA, 3404 bp, Homo sapiens
gcagttcagacccccccacacccatcaaagagccgctcctcccccccgcaggcgccttcgccgcctccctcccttcctttcctttccgctcctcttccgacctgtccacccgggaggaagggagctggaaagggggcggaaacctctcccctccaaaaagcacaacaaaactgttcagtgcggaggagccgggttcgcccctgccggacagcggggggctttgttccccgcagttgtttcctgcccatttgacctgtcagctgctggggaaacgctgctgttgacctttggttgaactgctaaggcgattttgctgatttttctttctttttccgcgagggctgtcttttgctcctccaaatgagcccagtccccctcccttctccccaaagcgctccaagagaaagtgccaggaaggggcttgtcccggaaggcctggcggctgagcggggccaggtcctggttaggccaccagggtgggcgtccgcgccattgtttgagcttgtcggcgctggtgggagagatgagggcaattcctctgggacgcaagtcccctcgaatggccggggctggccgggatgttccccgcacggcgctgccctcgagtccccccgatggagagcgcgggcgcgccttccttcgctggcgtccaaacccgggaccagctagaacacagcagggctgggactgggttccagccccacgtggagtctggatttgttttgttgtgttttgctttccttcctggaagaaatcccgaggggaccgccctagagcggcagctccaggacctcggcccttgggcttccgggggtgcagccacttaggccccgctcccggggagagagggattattttttaagatttatccccagggcgcgcggcatttccctgtccctcgtgaatcccgttgagagtcctccctccccaacctcctccatttccccagccagaccgattcgagagccctggagattctgggcgaggctagtgactgggtagtacaggcctctagccccaccattgctctctctgtcttcagttccccaggagggcaatggcatcaaacagcacagctctgggggatgtcaatattgcataccttttctacctaaagggaaaatgactcgcttttctgcttgcaaatatggtagtttctgcttacaaatgtaatacaatgcccatgacagccaaggactggaagcataagttgctaggtcttacaggtgattttttacaatgaagcaaactcactatgttagacaccatttacattggatgtctccaactaacaaaagtaactaaagacagatgtaggtgtaaattgagagtgaaatttgaccctttagaccgtcacaacttccttgggcttatcctgggtgcttataggagaggtgggctccacccacaaaaatggactgctcagaaaaatgagggagagagaaagggtggccactttcccgagccaagaaattccttgaaaaaaaatcagaacatctgaaaccagagagccgatttccttaccgggaggcagttcctggctaacgaagaggaagcacgatgggaagaaaagttcactccaacggaagccagtttgctgaacatagcagatcgcccaggaggactgggagagactgcaaaccagttcgagcccccagcatggcgttaggtgtcagccagctggcaggaaggtccaggtgtctgtgttcagagtctcaaggcggctatgagaggttttcctccgagtacccagaattctgttctaaaaccaaggccctggcagccatcccacccccggttccccccagtgccacagagcccttggacctgggctgcagctcctgtgggaccccactacacgaccaggggggtcctgtggagatccttcccttcctctacctcggcagtgcctaccatgctgcccggagagacatgctggacgccctgggcatcacggctctgttgaatgtctcctcggactgcccaaaccactttgaaggacactatcagtacaagtgcatcccagtggaagataaccacaaggccgacatcagctcctggttcatggaagccatagagtacatcgatgccgtgaaggactgccgtgggcgcgtgctggtgcactgccaggcgggcatctcgcggtcggccaccatctgcctggcctacctgatgatgaagaaacgggtgaggctggaggaggccttcgagttcgttaagcagcgccgcagcatcatctcgcccaacttcagcttcatggggcagctgctgcagttcgagtcccaggtgctggccacgtcctgtgctgcggaggctgctagcccctcgggacccctgcgggagcggggcaagacccccgccacccccacctcgcagttcgtcttcagctttccggtctccgtgggcgtgcactcggcccccagcagcctgccctacctgcacagccccatcaccacctctcccagctgttagagccgccctgggggccccagaaccagagctggctcccagcaagggtaggacgggccgcatgcgggcagaaagttgggactgagcagctgggagcaggcgaccgagctccttccccatcatttctccttggccaacgacgaggccagccagaatggcaataaggactccgaatacataataaaagcaaacagaacactccaacttagagcaataacggctgccgcagcagccagggaagaccttggtttggtttatgtgtcagtttcacttttccgatagaaatttcttacctcatttttttaagcagtaaggcttgaagtgatgaaacccacagatcctagcaaatgtgcccaaccagctttactaaagggggaggaagggagggcaaagggatgagaagacaagtttcccagaagtgcctggttctgtgtacttgtccctttgttgtcgttgttgtagttaaaggaatttcattttttaaaagaaatcttcgaaggtgtggttttcatttctcagtcaccaacagatgaataattatgcttaataataaagtatttattaagactttcttcagagtatgaaagtacaaaaagtctagttacagtggatttagaatatatttatgttgatgtcaaacagctgagcaccgtagcatgcagatgtcaaggcagttaggaagtaaatggtgtcttgtagatatgtgcaaggtagcatgatgagcaacttgagtttgttgccactgagaagcaggcgggttgggtgggaggaggaagaaagggaagaattaggtttgaattgctttttaaaaaaaaaagaaaagaaaaagacagcatctcactatgttgccaaggctcatcttgagaagcaggcgggttgggtgggaggaggaagaaagggaagaattaggtttgaattgcttttttaaaaaaaaa

SEQ ID NO: 377 - DNA, 809 bp, Homo sapiens
  modified_base (419)..(419): a, c, t or g
  modified_base (652)..(652): a, c, t or g
ttttatcagcagacatctttattagcaaattcagtaacaggataatctttccaaaatttacaaatatacaatatatttatagtattaccttcagacaacttcagtgcaaagatatacatatagtacattgtgataattatttgtaaaaatatgagacggcataagtaaaaaaagacacacaggatacctccaactataggcaaacagggaaaaatatatttttttcataaagtactgaatgttaacttttttcatctgtttgtaaaaaatatatgtgcaaaagtgtgtttctaattattccctaaatagctggtatagctatacttcagagtcttctttaacaagatttgcggggtctttaaaagtgtcttctggtgcagaataggttggagttgggtctcttctcgaaggaggcttangcttagcagggagcgaaggtgatggaggtggtgtcgcagcaacactttccttttgctcgttctccatctgtgcatagattggattttcaaagttggtagtttgtttagattttcgtttgaagagattccattttgtcacctgagttccatcagcagctggtgaagttgggtttgtctctggaactatctcagaagggtttatgggacttccataattcttattatccacattntcagatacaggcacctggattggctgaaccactttgacagcactgtctctggctgagtacaatgggttttcaaatattatgggctgcttccccatttccatgacaaagtctcactcattgccattgaccctgtaatagcagtctcaggtccaaaacc

SEQ ID NO: 378 - DNA, 14392 bp, Homo sapiens
gcagacctaaaggagcgttcgctagcagaggcgctgccggtgcggtgtgctacgcgcgcccacctcccggggaaggaacggcgaggccggggaccgtcgcggagatggatcgcgggccggcagcagtggcgtgcacgctgctcctggctctcgtcgcctgcctagcgccggccagtggccaagaatgtgacagtgcgcattttcgctgtggaagtgggcattgcatccctgcagactggaggtgtgatgggaccaaagactgttcagatgacgcggatgaaattggctgcgctgttgtgacctgccagcagggctatttcaagtgccagagtgagggacaatgcatccccagctcctgggtgtgtgaccaagatcaagactgtgatgatggctcagatgaacgtcaagattgctcacaaagtacatgctcaagtcatcagataacatgctccaatggtcagtgtatcccaagtgaatacaggtgcgaccacgtcagagactgccccgatggagctgatgagaatgactgccagtacccaacatgtgagcagcttacttgtgacaatggggcctgctataacaccagtcagaagtgtgattggaaagttgattgcagggactcctcagatgaaatcaactgcactgagatatgcttgcacaatgagttttcatgtggcaatggagagtgtatccctcgtgcttatgtctgtgaccatgacaatgattgccaagacggcagtgatgaacatgcttgcaactatccgacctgcggtggttaccagttcacttgccccagtggccgatgcatttatcaaaactgggtttgtgatggagaagatgactgtaaagataatggagatgaagatggatgtgaaagcggtcctcatgatgttcataaatgttccccaagagaatggtcttgcccagagtcgggacgatgcatctccatttataaagtttgtgatgggattttagattgcccaggaagagaagatgaaaacaacactagtaccggaaaatactgtagtatgactctgtgctctgccttgaactgccagtaccagtgccatgagacgccgtatggaggagcgtgtttttgtcccccaggttatatcatcaaccacaatgacagccgtacctgtgttgagtttgatgattgccagatatggggaatttgtgaccagaagtgtgaaagccgacctggccgtcacctgtgccactgtgaagaagggtatatcttggagcgtggacagtattgcaaagctaatgattcctttggcgaggcctccattatcttctccaatggtcgggatttgttaattggtgatattcatggaaggagcttccggatcctagtggagtctcagaatcgtggagtggccgtgggtgtggctttccactatcacctgcaaagagttttttggacagacaccgtgcaaaataaggttttttcagttgacattaatggtttaaatatccaagaggttctcaatgtttctgttgaaaccccagagaacctggctgtggactgggttaataataaaatctatctagtggaaaccaaggtcaaccgcatagatatggtaaatttggatggaagctatcgggttacccttataactgaaaacttggggcatcctagaggaattgccgtggacccaactgttggttatttatttttctcagattgggagagcctttctggggaacctaagctggaaagggcattcatggatggcagcaaccgtaaagacttggtgaaaacaaagctgggatggcctgctggggtaactctggatatgatatcgaagcgtgtttactgggttgactctcggtttgattacattgaaactgtaacttatgatggaattcaaaggaagactgtagttcatggaggctccctcattcctcatccctttggagtaagcttatttgaaggtcaggtgttctttacagattggacaaagatggccgtgctgaaggcaaacaagttcacagagaccaacccacaagtgtactaccaggcttccctgaggccctatggagtgactgtttaccattccctcagacagccctatgctaccaatccgtgtaaagataacaatgggggctgtgagcaggtctgtgttctcagccacagaacagataatgatggtttgggtttccgttgcaagtgcacattcggcttccaactggatacagatgagcgccactgcattgctgttcagaatttcctcattttttcatcccaagttgctattcgtgggatcccgttcaccttgtctacccaggaagatgtcatggttccagtttcggggaatccttctttctttgtcgggattgattttgacgcccaggacagcactatctttttttcagatatgtcaaaacacatgatttttaagcaaaagattgatggcacaggaagagaaattctcgcagctaacagggtggaaaatgttgaaagtttggcttttgattggatttcaaagaatctctattggacagactctcattacaagagtatcagtgtcatgaggctagctgataaaacgagacgcacagtagttcagtatttaaataacccacggtcggtggtagttcatccttttgccgggtatctattcttcactgattggttccgtcctgctaaaattatgagagcatggagtgacggatctcacctcttgcctgtaataaacactactcttggatggcccaatggcttggccatcgattgggctgcttcacgattgtactgggtagatgcctattttgataaaattgagcacagcacctttgatggtttagacagaagaagactgggccatatagagcagatgacacatccgtttggacttgccatctttggagagcatttattttttactgactggagactgggtgccattattcgagtcaggaaagcagatggtggagaaatgacagttatccgaagtggcattgcttacatactgcatttgaaatcgtatgatgtcaacatccagactggttctaacgcctgtaatcaacccacgcatcctaacggtgactgcagccacttctgcttcccggtgccaaatttccagcgagtgtgtgggtgcccttatggaatgaggctggcttccaatcacttgacatgcgagggggacccaaccaatgaaccacccacggagcagtgtggcttattttccttcccctgtaaaaatggcagatgtgtgcccaattactatctctgtgatggagtcgatgattgtcatgataacagtgatgagcaactatgtggcacacttaataatacctgttcatcttcggcgttcacctgtggccatggggagtgcattcctgcacactggcgctgtgacaaacgcaacgactgtgtggatggcagtgatgagcacaactgccccacccacgcacctgcttcctgccttgacacccaatacacctgtgataatcaccagtgtatctcaaagaactgggtctgtgacacagacaatgattgtggggatggatctgatgaaaagaactgcaattcgacagagacatgccaacctagtcagtttaattgccccaatcatcgatgtattgacctatcgtttgtctgtgatggtgacaaggattgtgttgatggatctgatgaggttggttgtgtattaaactgtactgcttctcaattcaagtgtgccagtggggataaatgtattggcgtcacaaatcgttgtgatggtgtttttgattgcagtgacaactcggatgaagcgggctgtccaaccaggcctcctggtatgtgccactcagatgaatttcagtgccaagaagatggtatctgcatcccgaacttctgggaatgtgatgggcatccagactgcctctatggatctgatgagcacaatgcctgtgtccccaagacttgcccttcatcatatttccactgtgacaacggaaactgcatccacagggcatggctctgtgatcgggacaatgactgcggggatatgagtgatgagaaggactgccctactcagccctttcgctgtcctagttggcaatggcagtgtcttggccataacatctgtgtgaatctgagtgtagtgtgtgatggcatctttgactgccccaatgggacagatgagtccccactttgcaatgggaacagctgctcagatttcaatggtggttgtactcacgagtgtgttcaagagccctttggggctaaatgcctatgtccattgggattcttacttgccaatgattctaagacctgtgaagacatagatgaatgtgatattctaggctcttgtagccagcactgttacaatatgagaggttctttccggtgctcgtgtgatacaggctacatgttagaaagtgatgggaggacttgcaaagttacagcatctgagagtctgctgttacttgtggcaagtcagaacaaaattattgccgacagtgtcacctcccaggtccacaatatctattcattggtcgagaatggttcttacattgtagctgttgattttgattcaattagtggtcgtatcttttggtctgatgcaactcagggtaaaacctggagtgcgtttcaaaatggaacggacagaagagtggtatttgacagtagcatcatcttgactgaaactattgcaatagattgggtaggtcgtaatctttactggacagactatgctctggaaacaattgaagtctccaaaattgatgggagccacaggactgtgctgattagtaaaaacctaacaaatccaagaggactagcattagatcccagaatgaatgagcatctactgttctggtctgactggggccaccaccctcgcatcgagcgagccagcatggacggcagcatgcgcactgtcattgtccaggacaagatcttctggccctgcggcttaactattgactaccccaacagactgctctacttcatggactcctatcttgattacatggacttttgcgattataatggacaccatcggagacaggtgatagccagtgatttgattatacggcacccctatgccctaactctctttgaagactctgtgtactggactgaccgtgctactcgtcgggttatgcgagccaacaagtggcatggagggaaccagtcagttgtaatgtataatattcaatggccccttgggattgttgcggttcatccttcgaaacaaccaaattccgtgaatccatgtgccttttcccgctgcagccatctctgcctgctttcctcacaggggcctcatttttactcctgtgtttgtccttcaggatggagtctgtctcctgatctcctgaattgcttgagagatgatcaacctttcttaataactgtaaggcaacatataatttttggaatctcccttaatcctgaggtgaagagcaatgatgctatggtccccatagcagggatacagaatggtttagatgttgaatttgatgatgctgagcaatacatctattgggttgaaaatccaggtgaaattcacagagtgaagacagatggcaccaacaggacagtatttgcttctatatctatggtggggccttctatgaacctggccttagattggatttcaagaaacctttattctaccaatcctagaactcagtcaatcgaggttttgacactccacggagatatcagatacagaaaaacattgattgccaatgatgggacagctcttggagttggctttccaattggcataactgttgatcctgctcgtgggaagctgtactggtcagaccaaggaactgacagtggggttcctgccaagatcgccagtgctaacatggatggcacatctgtgaaaactctctttactgggaacctcgaacacctggagtgtgtcactcttgacatcgaagagcagaaactctactgggcagtcactggaagaggagtgattgaaagaggaaacgtggatggaacagatcggatgatcctggtacaccagctttcccacccctggggaattgcagtccatgattctttcctttattatactgatgaacagtatgaggtcattgaaagagttgataaggccactggggccaacaaaatagtcttgagagataatgttccaaatctgaggggtcttcaagtttatcacagacgcaatgccgccgaatcctcaaatggctgtagcaacaacatgaatgcctgtcagcagatttgcctgcctgtaccaggaggattgttttcctgcgcctgtgccactggatttaaactcaatcctgataatcggtcctgctctccatataactctttcattgttgtttcaatgctgtctgcaatcagaggctttagcttggaattgtcagatcattcagaaaccatggtgccggtggcaggccaaggacgaaacgcactgcatgtggatgtggatgtgtcctctggctttatttattggtgtgattttagcagctcagtggcatctgataatgcgatccgtagaattaaaccagatggatcttctctgatgaacattgtgacacatggaataggagaaaatggagtccggggtattgcagtggattgggtagcaggaaatctttatttcaccaatgcctttgtttctgaaacactgatagaagttctgcggatcaatactacttaccgccgtgttcttcttaaagtcacagtggacatgcctaggcatattgttgtagatcccaagaacagatacctcttctgggctgactatgggcagagaccaaagattgagcgttctttccttgactgtaccaatcgaacagtgcttgtgtcagagggcattgtcacaccacggggcttggcagtggaccgaagtgatggctacgtttattgggttgatgattctttagatataattgcaaggattcgtatcaatggagagaactctgaagtgattcgttatggcagtcgttacccaactccttatggcatcactgtttttgaaaattctatcatatgggtagataggaatttgaaaaagatcttccaagccagcaaggaaccagagaacacagagccacccacagtgataagagacaatatcaactggctaagagatgtgaccatctttgacaagcaagtccagccccggtcaccagcagaggtcaacaacaacccttgcttggaaaacaatggtgggtgctctcatctctgctttgctctgcctggattgcacaccccaaaatgtgactgtgcctttgggaccctgcaaagtgatggcaagaattgtgccatttcaacagaaaatttcctcatctttgccttgtctaattccttgagaagcttacacttggaccctgaaaaccatagcccacctttccaaacaataaatgtggaaagaactgtcatgtctctagactatgacagtgtaagtgatagaatctacttcacacaaaatttagcctctggagttggacagatttcctatgccaccctgtcttcagggatccatactccaactgtcattgcttcaggtatagggactgctgatggcattgcctttgactggattactagaagaatttattacagtgactacctcaaccagatgattaattccatggctgaagatgggtctaaccgcactgtgatagcccgcgttccaaaaccaagagcaattgtgttagatccctgccaagggtacctgtactgggctgactgggatacacatgccaaaatcgagagagccacattgggaggaaacttccgggtacccattgtgaacagcagtctggtcatgcccagtgggctgactctggactatgaagaggaccttctctactgggtggatgctagtctgcagaggattgaacgcagcactctgacgggcgtggatcgtgaagtcattgtcaatgcagccgttcatgcttttggcttgactctctatggccagtatatttactggactgacttgtacacacaaagaatttaccgagctaacaaatatgacgggtcaggtcagattgcaatgaccacaaatttgctctcccagcccaggggaatcaacactgttgtgaagaaccagaaacaacagtgtaacaatccttgtgaacagtttaatgggggctgcagccatatctgtgcaccaggtccaaatggtgccgagtgccagtgtccacatgagggcaactggtatttggccaacaacaggaagcactgcattgtggacaatggtgaacgatgtggtgcatcttccttcacctgctccaatgggcgctgcatctcggaagagtggaagtgtgataatgacaacgactgtggggatggcagtgatgagatggaaagtgtctgtgcacttcacacctgctcaccgacagccttcacctgtgccaatgggcgatgtgtccaatactcttaccgctgtgattactacaatgactgtggtgatggcagtgatgaggcagggtgcctgttcagggactgcaatgccaccacggagtttatgtgcaataacagaaggtgcatacctcgtgagtttatctgcaatggtgtagacaactgccatgataataacacttcagatgagaaaaattgccctgatcgcacttgccagtctggatacacaaaatgtcataattcaaatatttgtattcctcgcgtttatttgtgtgacggagacaatgactgtggagataacagtgatgaaaaccctacttattgcaccactcacacatgcagcagcagtgagttccaatgcgcatctgggcgctgtattcctcaacattggtattgtgatcaagaaacagattgttttgatgcctctgatgaacctgcctcttgtggtcactctgagcgaacatgcctagctgatgagttcaagtgtgatggtgggaggtgcatcccaagcgaatggatctgtgacggtgataatgactgtggggatatgagtgacgaggataaaaggcaccagtgtcagaatcaaaactgctcggattccgagtttctctgtgtaaatgacagacctccggacaggaggtgcattccccagtcttgggtctgtgatggcgatgtggattgtactgacggctacgatgagaatcagaattgcaccaggagaacttgctctgaaaatgaattcacctgtggttacggactgtgtatcccaaagatattcaggtgtgaccggcacaatgactgtggtgactatagcgacgagaggggctgcttataccagacttgccaacagaatcagtttacctgtcagaacgggcgctgcattagtaaaaccttcgtctgtgatgaggataatgactgtggagacggatctgatgagctgatgcacctgtgccacaccccagaacccacgtgtccacctcacgagttcaagtgtgacaatgggcgctgcatcgagatgatgaaactctgcaaccacctagatgactgtttggacaacagcgatgagaaaggctgtggcattaatgaatgccatgacccttcaatcagtggctgcgatcacaactgcacagacaccttaaccagtttctattgttcctgtcgtcctggttacaagctcatgtctgacaagcggacttgtgttgatattgatgaatgcacagagatgccttttgtctgtagccagaagtgtgagaatgtaataggctcctacatctgtaagtgtgccccaggctacctccgagaaccagatggaaagacctgccggcaaaacagtaacatcgaaccctatctcatttttagcaaccgttactatttgagaaatttaactatagatggctatttttactccctcatcttggaaggactggacaatgttgtggcattagattttgaccgagtagagaagagattgtattggattgatacacagaggcaagtcattgagagaatgtttctgaataagacaaacaaggagacaatcataaaccacagactaccagctgcagaaagtctggctgtagactgggtttccagaaagctctactggttggatgcccgcctggatggcctctttgtctctgacctcaatggtggacaccgccgcatgctggcccagcactgtgtggatgccaacaacaccttctgctttgataatcccagaggacttgcccttcaccctcaatatgggtacctctactgggcagactggggtcaccgcgcatacattgggagagtaggcatggatggaaccaacaagtctgtgataatctccaccaagttagagtggcctaatggcatcaccattgattacaccaatgatctactctactgggcagatgcccacctgggttacatagagtactctgatttggagggccaccatcgacacacggtgtatgatggggcactgcctcaccctttcgctattaccatttttgaagacactatttattggacagattggaatacaaggacagtggaaaagggaaacaaatatgatggatcaaatagacagacactggtgaacacaacacacagaccatttgacatccatgtgtaccatccatataggcagcccattgtgagcaatccctgtggtaccaacaatggtggctgttctcatctctgcctcatcaagccaggaggaaaagggttcacttgcgagtgtccagatgacttccgcacccttcaactgagtggcagcacctactgcatgcccatgtgctccagcacccagttcctgtgcgctaacaatgaaaagtgcattcctatctggtggaaatgtgatggacagaaagactgctcagatggctctgatgaactggccctttgcccgcagcgcttctgccgactgggacagttccagtgcagtgacggcaactgcaccagcccgcagactttatgcaatgctcaccaaaattgccctgatgggtctgatgaagaccgtcttctttgtgagaatcaccactgtgactccaatgaatggcagtgcgccaacaaacgttgcatcccagaatcctggcagtgtgacacatttaacgactgtgaggataactcagatgaagacagttcccactgtgccagcaggacctgccggccgggccagtttcggtgtgctaatggccgctgcatcccgcaggcctggaagtgtgatgtggataatgattgtggagaccactcggatgagcccattgaagaatgcatgagctctgcccatctctgtgacaacttcacagaattcagctgcaaaacaaattaccgctgcatcccaaagtgggccgtgtgcaatggtgtagatgactgcagggacaacagtgatgagcaaggctgtgaggagaggacatgccatcctgtgggggatttccgctgtaaaaatcaccactgcatccctcttcgttggcagtgtgatgggcaaaatgactgtggagataactcagatgaggaaaactgtgctccccgggagtgcacagagagcgagtttcgatgtgtcaatcagcagtgcattccctcgcgatggatctgtgaccattacaacgactgtggggacaactcagatgaacgggactgtgagatgaggacctgccatcctgaatattttcagtgtacaagtggacattgtgtacacagtgaactgaaatgcgatggatccgctgactgtttggatgcgtctgatgaagctgattgtcccacacgctttcctgatggtgcatactgccaggctactatgttcgaatgcaaaaaccatgtttgtatcccgccatattggaaatgtgatggcgatgatgactgtggcgatggttcagatgaagaacttcacctgtgcttggatgttccctgtaattcaccaaaccgtttccggtgtgacaacaatcgctgcatttatagtcatgaggtgtgcaatggtgtggatgactgtggagatggaactgatgagacagaggagcactgtagaaaaccgacccctaaaccttgtacagaatatgaatataagtgtggcaatgggcattgcattccacatgacaatgtgtgtgatgatgccgatgactgtggtgactggtccgatgaactgggttgcaataaaggaaaagaaagaacatgtgctgaaaatatatgcgagcaaaattgtacccaattaaatgaaggaggatttatctgctcctgtacagctgggttcgaaaccaatgtttttgacagaacctcctgtctagatatcaatgaatgtgaacaatttgggacttgtccccagcactgcagaaataccaaaggaagttatgagtgtgtctgtgctgatggcttcacgtctatgagtgaccgccctggaaaacgatgtgcagctgagggtagctctcctttgttgctactgcctgacaatgtccgaattcgaaaatataatctctcatctgagaggttctcagagtatcttcaagatgaggaatatatccaagctgttgattatgattgggatcccaaggacataggcctcagtgttgtgtattacactgtgcgaggggagggctctaggtttggtgctatcaaacgtgcctacatccccaactttgaatccggccgcaataatcttgtgcaggaagttgacctgaaactgaaatacgtaatgcagccagatggaatagcagtggactgggttggaaggcatatttactggtcagatgtcaagaataaacgcattgaggtggctaaacttgatggaaggtacagaaagtggctgatttccactgacctggaccaaccagctgctattgctgtgaatcccaaactagggcttatgttctggactgactggggaaaggaacctaaaatcgagtctgcctggatgaatggagaggaccgcaacatcctggttttcgaggaccttggttggccaactggcctttctatcgattatttgaacaatgaccgaatctactggagtgacttcaaggaggacgttattgaaaccataaaatatgatgggactgataggagagtcattgcaaaggaagcaatgaacccttacagcctggacatctttgaagaccagttatactggatatctaaggaaaagggagaagtatggaaacaaaataaatttgggcaaggaaagaaagagaaaacgctggtagtgaacccttggctcactcaagttcgaatctttcatcaactcagatacaataagtcagtgcccaacctttgcaaacagatctgcagccacctctgccttctgagacctggaggatacagctgtgcctgtccccaaggctccagctttatagaggggagcaccactgagtgtgatgcagccatcgaactgcctatcaacctgccccccccatgcaggtgcatgcacggaggaaattgctattttgatgagactgacctccccaaatgcaagtgtcctagcggctacaccggaaaatattgtgaaatggcgttttcaaaaggcatctctccaggaacaaccgcagtagctgtgctgttgacaatcctcttgatcgtcgtaattggagctctggcaattgcaggattcttccactatagaaggaccggctcccttttgcctgctctgcccaagctgccaagcttaagcagtctcgtcaagccctctgaaaatgggaatggggtgaccttcagatcaggggcagatcttaacatggatattggagtgtctggttttggacctgagactgctattgacaggtcaatggcaatgagtgaagactttgtcatggaaatggggaagcagcccataatatttgaaaacccaatgtactcagccagagacagtgctgtcaaagtggttcagccaatccaggtgactgtatctgaaaatgtggataataagaattatggaagtcccataaacccttctgagatagttccagagacaaacccaacttcaccagctgctgatggaactcaggtgacaaaatggaatctcttcaaacgaaaatctaaacaaactaccaactttgaaaatccaatctatgcacagatggagaacgagcaaaaggaaagtgttgctgcgacaccacctccatcaccttcgctccctgctaagcctaagcctccttcgagaagagacccaactccaacctattctgcaacagaagacacttttaaagacaccgcaaatcttgttaaagaagactctgaagtatagctataccagctatttagggaataattagaaacacacttttgcacatatattttttacaaacagatgaaaaaagttaacattcagtactttatgaaaaaaatatatttttccctgtttgcctataggtggaggtatcctgtgtgtctttttttacttatgccgtctcatatttttacaaataattatcacaatgtactatatgtatatctttgcactgaagttgtctgaaggtaatactataaatatattgtatatttgtaaattttggaaagattatcctgttactgaatttgctaataaagatgtctgctgaaaaaaaa

SEQ ID NO: 379 - DNA, 378 bp, Homo sapiens
  modified_base (8)..(8): a, c, t or g
  modified_base (185)..(185): a, c, t or g
  modified_base (252)..(252): a, c, t or g
  modified_base (259)..(259): a, c, t or g
  modified_base (340)..(340): a, c, t or g
cacaaganttatgtctttattggttcatcttagaattaaatcaacatggaatatgtactttttgaattaaacaaaatgttttgataaaaatgagatacgtgtgtataaaagctggaaaactcatgtcccctgaaacttggtttccaccagatgagtttcaaattcagatactaaacacacatganggaaataatcaaatgaattctattcatcctttccccaaagttttgcttacaattaaggatatagggnattattngtatgccgaacaaacaaaataaattgggaaggatgtttggggataaacggggaaggtggaacacttcagggaactactatnttgccggtttgcggggacaggggtaatcttctctgggg

SEQ ID NO: 380 - DNA, 378 bp, Homo sapiens
  modified_base (1)..(1): a, c, t or g
  modified_base (345)..(345): a, c, t or g
nctccagtaaacagtgcttctagtgaagaaaatgtgaagtactccagttctcagccagaaccccgcacaggtctttccttatgggataccagcccctcatacattgataaattggtacaagggatcagcttttcccagcccacatgtcctgatcatatgcttttgaatagtcagttacttggcaccccaggatcctcacagaacccctgggcagcggttggtcaaaagaatgacacgattctttaccaaattggatgcagacaaatcttatcaatgcctgaaagagacttgtgagaagttggggctatcaatgggaagaaaagttgtatggaattcaggttactnatattccaacaactggataggggggaaacatta

SEQ ID NO: 381 - DNA, 2042 bp, Homo sapiens
ggggccagtcgttcgccggaaagcatttgtctcccacctcatcataacaacaattaatttcctctggggcctgaggagggcagaatttcaaccttcggtgtgcttgggagtggcgattgtgatttacacgacaaaatgccgaggtgctcggtggagtcatggcagtgccctttgtggaagactgggacttggtgcaaaccctgggagaaggtgcctatggagaagttcaacttgctgtgaatagagtaactgaagaagcagtcgcagtgaagattgtagatatgaagcgtgccgtagactgtccagaaaatattaagaaagagatctgtatcaataaaatgctaaatcatgaaaatgtagtaaaattctatggtcacaggagagaaggcaatatccaatatttatttctggagtactgtagtggaggagagctttttgacagaatagagccagacataggcatgcctgaaccagatgctcagagattcttccatcaactcatggcaggggtggtttatctgcatggtattggaataactcacagggatattaaaccagaaaatcttctgttggatgaaagggataacctcaaaatctcagactttggcttggcaacagtatttcggtataataatcgtgagcgtttgttgaacaagatgtgtggtactttaccatatgttgctccagaacttctgaagagaagagaatttcatgcagaaccagttgatgtttggtcctgtggaatagtacttactgcaatgctcgctggagaattgccatgggaccaacccagtgacagctgtcaggagtattctgactggaaagaaaaaaaaacatacctcaacccttggaaaaaaatcgattctgctcctctagctctgctgcataaaatcttagttgagaatccatcagcaagaattaccattccagacatcaaaaaagatagatggtacaacaaacccctcaagaaaggggcaaaaaggccccgagtcacttcaggtggtgtgtcagagtctcccagtggattttctaagcacattcaatccaatttggacttctctccagtaaacagtgcttctagtgaagaaaatgtgaagtactccagttctcagccagaaccccgcacaggtctttccttatgggataccagcccctcatacattgataaattggtacaagggatcagcttttcccagcccacatgtcctgatcatatgcttttgaatagtcagttacttggcaccccaggatcctcacagaacccctggcagcggttggtcaaaagaatgacacgattctttaccaaattggatgcagacaaatcttatcaatgcctgaaagagacttgtgagaagttgggctatcaatggaagaaaagttgtatgaatcaggttactatatcaacaactgataggagaaacaataaactcattttcaaagtgaatttgttagaaatggatgataaaatattggttgacttccggctttctaagggtgatggattggagttcaagagacacttcctgaagattaaagggaagctgattgatattgtgagcagccagaaggtttggcttcctgccacatgatcggaccatcggctctggggaatcctggtgaatatagtgctgctatgttgacattattcttcctagagaagattatcctgtcctgcaaactgcaaatagtagttcctgaagtgttcacttccctgtttatccaaacatcttccaatttattttgtttgttcggcatacaaataatacctatatcttaattgtaagcaaaactttggggaaaggatgaatagaattcatttgattatttcttcatgtgtgtttagtatctgaatttgaaactcatctggtggaaaccaagtttcaggggacatgagttttccagcttttatacacacgtatctcatttttatcaaaacattttgtttaattcaaaaagtacatatttcttccatgttgatttaattctaagatgaaccaataaagacataattcttgcaaaaaaaaaaaaaaaaaaaaaaaaaa

SEQ ID NO: 382 - DNA, 416 bp, Homo sapiens
  modified_base (5)..(6): a, c, t or g
  modified_base (8)..(8): a, c, t or g
  modified_base (10)..(10): a, c, t or g
  modified_base (12)..(13): a, c, t or g
  modified_base (129)..(129): a, c, t or g
  modified_base (364)..(364): a, c, t or g
  modified_base (413)..(413): a, c, t or g
gttanncnantnnattttttaagagagaggcaattttattcttccaaaaaaatgcaccagagagggtgagcacaggagcacccctggccacatcccccatcctaagcagggtctgagatgaggccaggnctgacgtgggcttgggagaagctgacggagctccctgtggccttggggagggaaccaggcagacctgggaagtggaactttgttgttagcaccaggagccgcccacagctgggcttcggcaacagggcagcacatggccctgttccttccacctgagagtctggggaggggctggtggcagaaggctccctgcaggaggttcacctgaatgactctcagattcacagaccccctnttgcccccacaacccctgtaaacatgagaatggggctcgtgacaccctnaac

SEQ ID NO: 383 - DNA, 426 bp, Homo sapiens
gaactcatcatcgaggacgacatcaggcccgagaagcagaagaggaagcctgggctgcggcggacccattcaagaaagtccggaagtctctggctcttgacattgtggatgaggatatgaagctgatgatgtccacactgcccaagtctctatccttgccgacaactgccccttcaaactcttccagcctcaccctgtcaggtatcaaagaagacaacagcttgctcaaccagggcttcttgcaggccaagcccgagaaggcagcagtggcccagaagccccgaagccacttcacgacacctgcccctatgtccagtgcctgggaagacggtggcctgcggggggaccaggggaccagcttttcatggcaggagaaagcccggcagcttctggggccgcttgaagcccagccacacttttcgggac

SEQ ID NO: 384 - DNA, 2731 bp, Homo sapiens
gcgcttggcgggagatagaaaagtgcttcaacccgcgccggcggcgactgcagttcctgcgagcgaggagcgcgggacctgctgacacgctgacgccttcgagcgcggcccggggcccggagcggccggagcagcccgggtcctgaccccggcccggctcccgctccgggctctgccggcgggcgggcgagcgcggcgcggtccgggccggggggatgtctcggcggacgcgctgcgaggatctggatgagctgcactaccaggacacagattcagatgtgccggagcagagggatagcaagtgcaaggtcaaatggacccatgaggaggacgagcagctgagggccctggtgaggcagtttggacagcaggactggaagttcctggccagccacttccctaaccgcactgaccagcaatgccagtacaggtggctgagagttttgaatccagaccttgtcaaggggccatggaccaaagaggaagaccaaaaagtcatcgagctggttaagaagtatggcacaaagcagtggacactgattgccaagcacctgaagggccggctggggaagcagtgccgtgaacgctggcacaaccacctcaaccctgaggtgaagaagtcttgctggaccgaggaggaggaccgcatcatctgcgaggcccacaaggtgctgggcaaccgctgggccgagatcgccaagatgttgccagggaggacagacaatgctgtgaagaatcactggaactctaccatcaaaaggaaggtggacacaggaggcttcttgagcgagtccaaagactgcaagcccccagtgtacttgctgctggagctcgaggacaaggacggcctccagagtgcccagcccacggaaggccagggaagtcttctgaccaactggccctccgtccctcctaccataaaggaggaggaaaacagtgaggaggaacttgcagcagccaccacatcgaaggaacaggagcccatcggtacagatctggacgcagtgcgaacaccagagcccttggaggaattcccgaagcgtgaggaccaggaaggctccccaccagaaacgagcctgccttacaagtgggtggtggaggcagctaacctcctcatccccgctgtgggttctagcctctctgaagccctggacttgatcgagtcggaccctgatgcttggtgtgacctgagtaaatttgacctccctgaggaaccatctgcagaggacagtatcaacaacagcctagtgcagctgcaagcgtcacatcagcagcaagtcctgccaccccgccagccttccgccctggtgcccagtgtgaccgagtaccgcctggatggccacaccatctcagacctgagccggagcagccggggcgagctgatccccatctcccccagcactgaagtcgggggctctggcattggcacaccgccctctgtgctcaagcggcagaggaagaggcgtgtggctctgtcccctgtcactgagaatagcaccagtctgtccttcctggattcctgtaacagcctcacgcccaagagcacacctgttaagaccctgcccttctcgccctcccagtttctgaacttctggaacaaacaggacacattggagctggagagcccctcgctgacatccaccccagtgtgcagccagaaggtggtggtcaccacaccactgcaccgggacaagacacccctgcaccagaaacatgctgcgtttgtaaccccagatcagaagtactccatggacaacactccccacacgccaaccccgttcaagaacgccctggagaagtacggacccctgaagcccctgccacagaccccgcacctggaggaggacttgaaggaggtgctgcgttctgaggctggcatcgaactcatcatcgaggacgacatcaggcccgagaagcagaagaggaagcctgggctgcggcggagccccatcaagaaagtccggaagtctctggctcttgacattgtggatgaggatgtgaagctgatgatgtccacactgcccaagtctctatccttgccgacaactgccccttcaaactcttccagcctcaccctgtcaggtatcaaagaagacaacagcttgctcaaccagggcttcttgcaggccaagcccgagaaggcagcagtggcccagaagccccgaagccacttcacgacacctgcccctatgtccagtgcctggaagacggtggcctgcggggggaccagggaccagcttttcatgcaggagaaagcccggcagctcctgggccgcctgaagcccagccacacatctcggaccctcatcttgtcctgaggtgttgagggtgtcacgagcccattctcatgtttacaggggttgtgggggcagagggggtctgtgaatctgagagtcattcaggtgacctcctgcagggagccttctgccaccagcccctccccagactctcaggtggaggcaacagggccatgtgctgccctgttgccgagcccagctgtgggcggctcctggtgctaacaacaaagttccacttccaggtctgcctggttccctccccaaggccacagggagctccgtcagcttctcccaagcccacgtcaggcctggcctcatctcagaccctgcttaggatgggggatgtggccaggggtgctcctgtgctcaccctctcttggtgcatttttttggaagaataaaattgcctctctcttaaaaaaaaaaaaaaaaaa

SEQ ID NO: 385 - DNA, 389 bp, Homo sapiens
  modified_base (3)..(3): a, c, t or g
aanaaaaaaatctgggaggggcatttttataggacccataaccattgacagttaatatcagccacaataagggaccttcaggagccgctttctagacccagggtctctgggaagcctcatcccacaccctctcctgctgtccagggccatctgggagctggtctgagtgtccactgagtccgtttatttggcggtctgtctcactgggtttgcacgacagtttggacatctctgtgtggctccctgtggctgaaggcttgtcggattttccgtaagaggctcccccagggctgtctatgggtccgtgtttgatatttgggtggatctttggggaacgcgagtccagggagagggtccattcgtggggaaaaccacccagcattgtgtca

SEQ ID NO: 386 - DNA, 474 bp, Homo sapiens
  modified_base (71)..(71): a, c, t or g
  modified_base (319)..(319): a, c, t or g
  modified_base (427)..(427): a, c, t or g
  modified_base (442)..(442): a, c, t or g
  modified_base (456)..(456): a, c, t or g
  modified_base (472)..(472): a, c, t or g
ggctgcggctggagattcgcgcgctcggacgactgacccgccactaccggaaacacacggggcagcgcttnccgctgccagctctgcccacgtgctttttcgcgctctgaccacctggccttgcacatgaagcgccacctttgagccctgccctggcacttggactctcctagtgactggggatgggacaagaagcctgtttggtggtctcttcacacggacgcgcgtgacacaatgctgggtggttttcccacgaatggaccctctcctgggactcgcgttcccaaagatccacccaaatatcaaacacggacccatnagacagccctgggggagcctcttacggaaaatccgacaagcttttagccacagggagccacacagagatgttccaaattttcgttgcaaacccagtgagacagaccgncaattaaacgggttnattggacatttagnccagtttccagatggnct

SEQ ID NO: 387 - DNA, 1618 bp, Homo sapiens
tcagagttcacgaggcagccgaggaagaggaggcttgaggcccagggtgggcaccagccagccatggccacagccgagaccgccttgccctccatcagcacactgaccgccctgggccccttcccggacacacaggatgacttcctcaagtggtggcgctccgaagaggcgcaggacatgggcccgggtcctcctgaccccacggagccgcccctccacgtgaagtctgaggaccagcccggggaggaagaggacgatgagaggggcgcggacgccacctgggacctggatctcctcctcaccaacttctcgggcccggagcccggtggcgcgccccagacctgcgctctggcgcccagcgaggcctccggggcgcaatatccgccgccgcccgagactctgggcgcatatgctggcggcccggggctggtggctgggcttttgggttcggaggatcactcgggttgggtgcgccctgccctgcgagcccgggctcccgacgccttcgtgggcccagccctggctccagccccggcccccgagcccaaggcgctggcgctgcaaccggtgtacccggggcccggcgccggctcctcgggtggctacttcccgcggaccgggctttcagtgcctgcggcgtcgggcgccccctacgggctactgtccgggtaccccgcgatgtacccggcgcctcagtaccaagggcacttccagctcttccgcgggctccagggacccgcgcccggtcccgccacgtccccctccttcctgagttgtttgggacccgggacggtgggcactggactcggggggactgcagaggatccaggtgtgatagccgagaccgcgccatccaagcgaggccgacgttcgtgggcgcgcaagaggcaggcagcgcacacgtgcgcgcacccgggttgcggcaagagctacaccaagagctcccacctgaaggcgcatctgcgcacgcacacaggggagaagccatacgcctgcacgtgggaaggctgcggctggagattcgcgcgctcggacgagctgacccgccactaccggaaacacacggggcagcgccccttccgctgccagctctgcccacgtgctttttcgcgctctgaccacctggccttgcacatgaagcgccacctttgagccctgccctggcacttggactctcctagtgactggggatgggacaagaagcctgtttggtggtctcttcacacggacgcgcgtgacacaatgctgggtggttttcccacgaatggaccctctcctggactcgcgttcccaaagatccacccaaatatcaaacacggacccatagacagccctgggggagcctcttacggaaaatccgacaagccttcagccacagggagccacacagagatgtccaaactgtcgtgcaaacccagtgagacagaccgccaaataaacggactcagtggacactcagaccagctcccagatggccctggacagcaggagagggtgtgggatgaggcttcccagagaccctgggtctagaaagcggctcctgaaggtcccttattgtggctgatattaactgtcaatggttatgggtcctataaaaatgcccctcccagataaaaaa

SEQ ID NO: 388 - DNA, 292 bp, Homo sapiens
  modified_base (179)..(179): a, c, t or g
  modified_base (236)..(236): a, c, t or g
  modified_base (244)..(244): a, c, t or g
  modified_base (263)..(263): a, c, t or g
  modified_base (282)..(282): a, c, t or g
  modified_base (287)..(287): a, c, t or g
aaaaaatcaagttgtaaacttttattacaaattaaaaatgaagttcttaaaaatctcaacttgaccagatatgaaacaatttaaaaacctttaaaggcgtattgagaaaaaccaggcttttttaaaaaacacgtttgttattaccaaaaagagacgtctttaggtaaaaataataaaanccccatgctgcatagataatgcagatagttctatttatctggtcaacgggccaaaangcaaggcnctttaggtcttcagctccnatcttttggttccatttcntattncctgg

SEQ ID NO: 389 - DNA, 475 bp, Homo sapiens
  modified_base (227)..(227): a, c, t or g
  modified_base (287)..(287): a, c, t or g
  modified_base (314)..(314): a, c, t or g
  modified_base (343)..(343): a, c, t or g
  modified_base (383)..(383): a, c, t or g
  modified_base (388)..(388): a, c, t or g
  modified_base (406)..(406): a, c, t or g
  modified_base (432)..(432): a, c, t or g
  modified_base (451)..(451): a, c, t or g
  modified_base (459)..(459): a, c, t or g
aggggccctcctcgccaaagacagcctagagaggacggcaatgaagaagataaagaaaatcaaggagatgagacccaaggtcagcagccacctcaacgtcggtaccgccgcaacttcaattaccgacgcagacgcccagaaaaccctaaaccacaagatggcaaagagacaaaagcagccgatccaccagctgagaattcgtccgctcccgaggctgagcagggcgnggctgagtaaatgccggcttaccatctctaccatcatccggtttagtcatccaacaagangaaatatgaaattccagcaattaaganatgaacaaaagattggagctgaagacctnaaagtgcttgctttttgcccgttgaccagataaatagganctatnctggcttatctatgcagnatggggtttttattattttttacctnaagacgtctgtttttggtnattaacanacgtgtttttttaaaa

SEQ ID NO: 390 - DNA, 1554 bp, Homo sapiens
gcggaccccagagagccctgagcagccccaccgccgccgccggcctagttaccatcacaccccgggaggagccgcagctgccgcagccggccccagtcaccatcaccgcaaccatgagcagcgaggccgagacccagcagccgcccgccgccccccccgccgcccccgccctcagcgccgccgacaccaagcccggcactacgggcagcggcgcagggagcggtggcccgggcggcctcacatcggcggcgcctgccggcggggacaagaaggtcatcgcaacgaaggttttgggaacagtaaaatggttcaatgtaaggaacggatatggtttcatcaacaggaatgacaccaaggaagatgtatttgtacaccagactgccataaagaagaataaccccaggaagtaccttcgcagtgtaggagatggagagactgtggagtttgatgttgttgaaggagaaaagggtgcggaggcagcaaatgttacaggtcctggtggtgttccagttcaaggcagtaaatatgcagcagaccgtaaccattatagacgctatccacgtcgtaggggtcctccacgcaattaccagcaaaattaccagaatagtgagagtggggaaaagaacgagggatcggagagtgctcccgaaggccaggcccaacaacgccggccctaccgcaggcgaaggttcccaccttactacatgcggagaccctatgggcgtcgaccacagtattccaaccctcctgtgcagggagaagtgatggagggtgctgacaaccagggtgcaggagaacaaggtagaccagtgaggcagaatatgtatcggggatatagaccacgattccgcaggggccctcctcgccaaagacagcctagagaggacggcaatgaagaagataaagaaaatcaaggagatgagacccaaggtcagcagccacctcaacgtcggtaccgccgcaacttcaattaccgacgcagacgcccagaaaaccctaaaccacaagatggcaaagagacaaaagcagccgatccaccagctgagaattcgtccgctcccgaggctgagcagggcggggctgagtaaatgccggcttaccatctctaccatcatccggtttagtcatccaacaagaagaaatatgaaattccagcaataagaaatgaacaaaagattggagctgaagacctaaagtgcttgctttttgcccgttgaccagataaaataactatctgcattatctatgcagcatggggtttttattatttttacctaaagacgtctctttttggtaataacaaacgtgttttttaaaaaagcctggtttttctcaatacgcctttaaaggtttttaaattgtttcatatctggtcaagttgagatttttaagaacttcatttttaatttgtaataaaagtttacaacttgattttttcaaaaaagtcaacaaactgcaagcacctgttaataaaggtcttaaataataaaaaaaaaaaaaaaaaaaaaaaaaaaaaaaaaaaaaaaaaaaaaaaaaaaaaaaaaaaaccctgag

SEQ ID NO: 391 - DNA, 365 bp, Homo sapiens
tatagaaattctttattattagacaaaaatagactctcttttttcccctattcatgtgatcctactctgaatctctgctcagaggaggcagtgactcgctccccacccctctcccatccctgccgtgctggcacctgcagctgggtggaactggcaggggctgatcccctgggagggctgacgttctcctgcaggtggggctgcctgatctccttcggggctcaactgctgatgcctcctcacccctcacacacccatctctgccatctgctcacatggcaagggtcatcttgtggggcctggtccactttaacttaggcagggctggggggcgggggaagggagaggcagtgttcccaggggcc

SEQ ID NO: 392 - DNA, 400 bp, Homo sapiens
  modified_base (162)..(162): a, c, t or g
  modified_base (196)..(196): a, c, t or g
  modified_base (333)..(333): a, c, t or g
  modified_base (365)..(365): a, c, t or g
tcaagggctgccccagtgagccctactttggcagcctgtccgccttggtctcccagcactccatctcccccatctccctgccctgctgcctgcgcattcccagcaaagatcctctggaagagaccccagaggctccagtgcccaccaacatgagcacagcgncagacctcctgcgtcagggtgctgcctgcaggtngctctacttgacctcagtggagacagagtcactgacgggcccccaagctgtggcccgggccagctctgcagctctgagctgtagcccccgcccgacaccagctgttgtccacttcaaggtgtcagcccagggcattnacactgacgggacaaccaaaggaagctctttnttttcgccgccattatccagtggaacagcatcacc

SEQ ID NO: 393 - DNA, 4952 bp, Homo sapiens
gcacattctttcaagtgacagctatagcctgtcccaggggctgctgtccacagcttggggctgaagactcccaggccattaaccccttagcttttaggaagattactccccctttttcaaggccccatccacctccctcccttgactcccaggacgggaagttggccatgttcccaggagggaggccggaggcccatggatgggggtggagtatgtgttgggaggggggacctcctgtccagtcctcaggccctgggacagctgctgaggaaggagagcagacccaggagagccatgaagcctaggaaagctgagcctcatagcttccgggagaaggttttccggaagaaacctccagtctgtgcagtatgtaaggtgaccatcgatgggacaggcgtttcgtgcagagtctgcaaggtggcgacgcacagaaaatgtgaagcaaaggtgacttcagcctgtcaggccttgcctcccgtggagttgcggcgaaacacggccccagtcaggcgcatagagcacctgggatccaccaaatctctgaaccactcaaagcagcgcagcactctgcccaggagcttcagcctggacccgctcatggagcggcgctgggacttagacctcacctacgtgacggagcgcatcttggccgccgccttccccgcgcggcccgatgaacagcggcaccggggccacctgcgcgagctggcccatgtgctgcaatccaagcaccgggacaagtacctgctcttcaacctttcagagaaaaggcatgacctgacccgcttaaaccccaaggttcaagacttcggctggcctgagctgcatgctccacccctggacaagctgtgctccatctgcaaagccatggagacatggctcagtgctgacccacagcacgtggtcgtactatactgcaagggaaacaagggcaagcttggggtcatcgtttctgcctacatgcactacagcaagatctctgcaggggcggaccaggcactggccactcttaccatgcggaaattctgcgaggacaaggtggccacagaactgcagccctcccagcgtcgatatatcagctacttcagtgggctgctatctggctccatcagaatgaacagcagccctctcttcctgcactatgtgctcatccccatgctgccagcctttgaacctggcacaggcttccagcccttccttaaaatctaccagtccatgcagcttgtctacacatctggagtctatcacattgcaggccctggtccccagcagctttgcatcagcctggagccagccctcctcctcaaaggcgatgtcatggtaacatgttatcacaagggtggccggggcacagaccggaccctcgtgttccgagtccagttccacacctgcaccatccacggaccacagctcactttccccaaggaccagcttgacgaggcctggactgatgagaggttccccttccaagcctccgtggagtttgtcttctcctccagccccgagaagatcaaaggcagcactccacggaacgacccctcggtctctgtcgactacaacaccactgagccagccgtgcgctgggactcctatgagaacttcaaccagcaccacgaggacagtgtggatggctccttgacccacacccggggtcccctggatggcagtccttatgcccaggtgcagcggcctccccggcagacccccccggcaccctctccagagcctccaccaccccccatgctctctgtcagcagcgactcaggccattcctccacgctgaccacagagccggctgctgagtcccctggccggccgccccctacagctgctgaacggcaggagctggatcgcctcctaggaggctgcggagtggccagtgggggccggggagctgggcgcgagacggccatcctagatgacgaagagcagcccactgtgggcggaggcccccacctcggagtgtatccaggccataggcctggcctcagccgccactgctcctgccgccagggctaccgggagccctgcggggttcccaatgggggctactaccggccagagggaaccctggagaggaggcgactggcctacgggggctatgagggatccccccagggctacgccgaggcctcgatggagaagaggcgcctctgccgatcgctgtcagaggggctatacccctacccacctgagatggggaaaccagccactggggactttggctaccgcgccccaggctaccgggaggtggtcatcctggaggaccctgggctgcctgccctatacccatgcccagcctgcgaggagaagctggcgctgcctacagcagccttgtatggactgcggctggagagggaggctggagaagggtgggcaagtgaggctggcaagcctctcctgcacccagtgcggcctgggcacccgctgcctctgctcttgcctgcctgtgggcatcaccatgccccgatgcctgactacagctgcctgaagccacccaaggcaggcgaggaagggcacgagggctgctcctacaccatgtgccccgaaggcaggtatgggcatccagggtaccctgccctggtgacatacagctatggaggagcagttcccagttactgcccagcatatggccgtgtgcctcatagctgtggctctccaggagagggcagagggtatcccagccctggtgcccactccccacgggctggctccatttccccgggcagcccgccctatccacaatctaggaagctgagctacgagatccctacggaggagggaggggacaggtacccattgcctgggcacctggcctcagcaggacctttggcatctgcagagtcgctggagccggtgtcctggagggagggccccagtgggcacagcacactgcctcggtctccccgagatgccccatgcagtgcttcgtcagagttgtctggtccctccacgcccctgcacaccagcagtccagtccagggcaaggaaagcacccggcgacaggacaccaggtcccccacctcagcgcccactcagagactgagtcctggcgaggccttgccccctgtttcccaggcaggcaccggaaaggcccctgagctgccgtcgggaagtgggcctgagcctctggcccctagcccagtctctccgaccttccctcccagctcgcccagtgactggcctcaggaaaggagtccagggggccactcagatggcgccagtcctcggagccctgtgcccaccacacttcctggcctccgccacgccccctggcaaggccctcgaggcccccccgacagcccagatgggtctcccctcactcctgtgccttcccagatgccctggcttgtggccagcccagagccgcctcagagctcacctacacctgctttccccctggctgcctcctatgacaccaatggccttagccagcccccacttcctgagaaacgccacctgcccgggccggggcaacagccaggaccctggggcccagagcaggcatcatcgccagccagaggcatcagtcaccatgtcaccttcgcacctctgctctcagataatgtcccccaaaccccagagcctcctacacaagagagccaaagcaatgtcaagtttgtccaggatacatccaagttctggtacaagccacacctgtcccgtgaccaagccattgccctgctgaaggacaaggaccctggggccttcctgatcagggacagtcattcattccaaggagcttatgggctggccctcaaggtggccacaccgccacccagtgcccagccctggaaaggggaccccgtggaacagctggtccgccatttcctcatcgagactgggcccaaaggggtgaagatcaagggctgccccagtgagccctactttggcagcctgtccgccttggtctcccagcactccatctcccccatctccctgccctgctgcctgcgcattcccagcaaagatcctctggaagagaccccagaggctccagtgcccaccaacatgagcacagcggcagacctcctgcgtcagggtgctgcctgcagcgtgctctacttgacctcagtggagacagagtcactgacgggcccccaagctgtggcccgggccagctctgcagctctgagctgtagcccccgcccgacaccagctgttgtccacttcaaggtgtcagcccagggcattacactgacggacaaccaaaggaagctcttctttcgccgccattatccagtgaacagcatcaccttctccagcactgaccctcaagaccggagatggaccaacccagacgggaccacctccaagatctttggtttcgtggccaagaagccgggaagcccctgggagaatgtgtgtcacctctttgcagagcttgacccagatcagcctgctggcgccattgtcaccttcatcaccaaagttctactgggccagagaaaatgaaggaaggccacaagctcagagcccacatcaacactgcccccctcccagcaccccacagccctcacatcccctggcctggacccaggagacccaggagaaagcaccctcccttaggaatgaggagtgggcatcaggcctgggacactgctctccttccccgcccccagcctgctaagttaagtggacaggcccacaagatgaccttgcatgtgagcagatggcagagatgggtgtgtgaggggtgaggaggcatcagcagttgagccccgaaggagatcaggcagccccacctgcaggagaacgtcagccctccaggggatcagcccctgccagttccacccagctgcaggtgccagcacggcagggatgggagaggggtggggagcgagtcactgcctcctctgagcagagattcagagtaggatcacatgaataggggaaaaaagagagtctatttttgtctaataataaagaatttctataaactttagccgaaa

SEQ ID NO: 394 - DNA, 511 bp, Homo sapiens
tttttaaaacattaaataattttattcttttctcatttacagtagcccagtggtaagcatgttagaaaacctgaagaaatttaaaagtttttggtttacaaaaagcatgtataaaaatacctgttcagacaaacaaagatctgatcattacattgcccagctttaagaatgccaaaaataactaaaatactgtcaatcaaatgagagggctacatgggtttattaaagtttattttaacaattttagctaagcagaatgtgctaatgtaattcaagttacagttactgccagataacataagagaaaacattgtgtgtggccacttaagattatgcctcaaacagatactgtttcgtgcgcagaacagagttggggaacacagctgggttaagtttcaatggtaagcagcaataaagatcaagaaaatccccaacttttctaataaccgctatacaatatgaaaaaaaaaatagtatctatcaccacctcttaacaatggacatcaaaatt

SEQ ID NO: 395 - DNA, 2635 bp, Homo sapiens
ggccgacgcgagcgccgcgcttcgcttcagctgctagctggcccaagggaggcgaccgcggagggtggcgaggggcggccaggacccgcagccccggggccgggccggtccggaccgccagggagggcaggtcagtgggcagatcgcgtccgcgggattcaatctctgcccgctctgataacagtccttttccctggcgctcacttcgtgcctggcacccggctgggcgcctcaagaccgttgtctcttcgatcgcttctttggacttggcgaccatttcagagatgtcttccagaagtaccaaagatttaattaaaagtaagtggggatcgaagcctagtaactccaaatccgaaactacattagaaaaattaaagggagaaattgcacacttaaagacatcagtggatgaaatcacaagtgggaaaggaaagctgactgataaagagagacacagacttttggagaaaattcgagtccttgaggctgagaaggagaagaatgcttatcaactcacagagaaggacaaagaaatacagcgactgagagaccaactgaaggccagatatagtactaccgcattgcttgaacagctggaagagacaacgagagaaggagaaaggagggagcaggtgttgaaagccttatctgaagagaaagacgtattgaaacaacagttgtctgctgcaacctcacgaattgctgaacttgaaagcaaaaccaatacactccgtttatcacagactgtggctccaaactgcttcaactcatcaataaataatattcatgaaatggaaatacagctgaaagatgctctggagaaaaatcagcagtggctcgtgtatgatcagcagcgggaagtctatgtaaaaggacttttagcaaagatctttgagttggaaaagaaaacggaaacagctgctcattcactcccacagcagacaaaaaagcctgaatcagaaggttatcttcaagaagagaagcagaaatgttacaacgatctcttggcaagtgcaaaaaaagatcttgaggttgaacgacaaaccataactcagctgagttttgaactgagtgaatttcgaagaaaatatgaagaaacccaaaaagaagttcacaatttaaatcagctgttgtattcacaaagaagggcagatgtgcaacatctggaagatgataggcataaaacagagaagatacaaaaactcagggaagagaatgatattgctaggggaaaacttgaagaagagaagaagagatccgaagagctcttatctcaggtccagtttctttacacatctctgctaaagcagcaagaagaacaaacaagggtagctctgttggaacaacagatgcaggcatgtactttagactttgaaaatgaaaaactcgaccgtcaacatgtgcagcatcaattgcttgtaattcttaaggagctccgaaaagcaagaaatcaaataacacagttggaatccttgaaacagcttcatgagtttgccatcacagagccattagtcactttccaaggagagactgaaaacagagaaaaagttgccgcctcaccaaaaagtcccactgctgcactcaatgaaagcctggtggaatgtcccaagtgcaatatacagtatccagccactgagcatcgcgatctgcttgtccatgtggaatactgttcaaagtagcaaaataagtatttgttttgatattaaaagattcaatactgtattttctgttagcttgtgggcattttgaattatatatttcacattttgcataaaactgcctatctacctttgacactccagcatgctagtgaatcatgtatcttttaggctgctgtgcatttctcttggcagtgatacctccctgacatggttcatcatcaggctgcaatgacagaatgtggtgagcagcgtctactgagactactaacattttgcactgtcaaaatacttggtgaggaaaagatagctcaggttattgctaatgggttaatgcaccagcaagcaaaatattttatgttttgggggtttgaaaaatcaaagataattaaccaaggatcttaactgtgttcgcattttttatccaagcacttagaaaacctacaatcctaattttgatgtccattgttaagaggtggtgatagatactattttttttttcatattgtatagcggttattagaaaagttggggattttcttgatctttattgctgcttaccattgaaacttaacccagctgtgttccccaactctgttctgcgcacgaaacagtatctgtttgaggcataatcttaagtggccacacacaatgttttctcttatgttatctggcagtaactgtaacttgaattacattagcacattctgcttagctaaaattgttaaaataaactttaataaacccatgtagccctctcatttgattgacagtattttagttatttttggcattcttaaagctgggcaatgtaatgatcagatctttgtttgtctgaacaggtatttttatacatgctttttgtaaaccaaaaacttttaaatttcttcaggttttctaacatgcttaccactgggctactgtaaatgagaaaagaataaaattatttaatgttttaaaaaaaaaaaaaaaaaaaa

SEQ ID NO: 396 - DNA, 417 bp, Homo sapiens
  modified_base (277)..(277): a, c, t or g
  modified_base (317)..(317): a, c, t or g
  modified_base (322)..(322): a, c, t or g
  modified_base (355)..(355): a, c, t or g
  modified_base (380)..(380): a, c, t or g
  modified_base (386)..(386): a, c, t or g
  modified_base (399)..(399): a, c, t or g
  modified_base (406)..(406): a, c, t or g
atttatttattcttaaatgatgcatttgaaatctatagtattcctaaaagtcttctaaacagtattaaatgttctacccataaaggttcccagaaaatatttgagtaaatctatctgatggtctagacctgaaaataaagaaagtttattttgctgggcgctgtggttcatgcctgtaatcgcagcactctgggaggccaaggcggatgggatcacttgaggtcaggagttcgagactattctgcgcaacatagtgaaaccctgtatctacaagganataaaaaaattaggcccgccatgggtgggcctgtgccccntggtncttcaggctactcggtagggctgagggtggggnggggtccaccctgagccttgggggngggtcnggggctcccagtngggcccnggttccacggc

SEQ ID NO: 397 - DNA, 420 bp, Homo sapiens
  modified_base (335)..(335): a, c, t or g
  modified_base (393)..(393): a, c, t or g
ggtttagtaatgttaggttttgttttggaggaaactaggcatacaagacatgttaataagactatgtgaataatgaatttaaaaagatcttgagtatatactcataactccagaaataacattaacttgaagctttatttcttgacaaaagctttatgaatgttatgagtttaaaatatgtcaatttaatactatgatttaaaaaacaatagcagatttcgtatgactgtggggacatggaaaaatcaagatcctattgattgctagctctggctcacttattctccggtaatgatactattggatatataccaaaattatataagcaaaaaganaaaaaataagttttcctgggcccggtcttccattcttctggtccccttactatagtanttctagttactctcctcttatttctga

SEQ ID NO: 398 - DNA, 2533 bp, Homo sapiens
gtggggcgaacatggctgaaggaagccgaggtggccctacgtgtagcggggtgggtggcaggcaggacccagtctccggcagtggcggctgcaactttccagagtatgagcttcccgagctaaatacgcgcgctttccatgtgggcgcctttggggagctgtggcggggccgtctgcgcggggccggggacttgtcgctgagggagccgccggcatccgctctgcctgggagccaggcagctgactccgaccgggaggatgccgcggtggccagggatctggactgcagcctggaggcggcggctgagctgagggcggtgtgcggccttgataaactgaaatgccttgaggacggtgaggatccagaagtcattccggagaatactgacctggtgactttgggggttagaaaaaggttcttggaacatcgggaagaaaccattacaatagatcgagcctgcagacaagaaacattcgtttatgagatggagtcacatgccataggaaaaaagcctgaaaattcagcagacatgattgaagaaggggagcttatcctatctgtgaatatcttgtaccctgttatatttcataagcacaaagaacacaaaccataccaaacaatgctggtgttgggcagtcaaaaactcacacaactgagggattcaattcgatgtgtcagtgacctccagattggtggtgaattcagcaacactcctgaccaagcccctgagcacatcagcaaagacctatacaaatcagccttcttttattttgaaggaacattttataatgataaaagatacccagaatgcagagatttgagcagaactatcattgagtggtcagagtcccatgatagaggctatggaaagtttcagactgctagaatggaagatttcaccttcaatgacttgtgtattaaactgggttttccttacttatactgtcatcagggagactgtgaacatgtcattgtcattactgacataaggcttgtgcatcatgatgactgcttggataggacattgtatcccctccttatcaagaagcattggctatggaccagaaaatgttttgtttgtaaaatgtatacagccagatgggtgacgaacaatgacagttttgcaccagaggacccatgcttcttttgtgatgtttgcttccgaatgctgcactatgattcagaaggcaacaaactgggggaattccttgcttatccttatgttgatcctggaacctttaattaagaatagctacactcacaaaaataccccctcatgaaataactgttctcttggatggttaccttatttctaagaaacgccactgaggaacaggatccactttgaacagtccgctaaagctatcaaaaaaaagtccaaatcacagattttcttataatgatagtatttaaatgtttataacatagtttaattttatatttattccagatagtatttaatttagtgctttttacccattttgagttgagttgtagtactttatatattctgactttaaatcctttgctcagacacacatattctttctcccaatccatgccttccctattcattctctgtccagagttttttgctaaagatagaattattaatgatacatcaagtagtggaagtgttttgaaaattctttgaagaatgtgagagctacaccttctaccatgaggcttccaaggttgtatttaaatttgactgaatatctggatggctaagaacagacatttatcttacacatggaaaactgacgaaacctataagcctatgtgtttgacagtgaagtatgttttatggacttaaatgccacaaacagttaagtccattggcttggagatgacaagcacgagtttctggtatgtctagtgttctcattcactgattcagtcagtacacagataatcactatagagaacttaagaggctggcttatgttatacctaaatttttactttctgtatacaacaatgctaaaattgagcagattgataactgccagcaaaccatagatttaagataaatgaatgatttacccaacccgaaattccatgggctaaattttgatcctttattttcaatacgcgttccttataggtcttacatcgatatcgaaggatattttatcttattcattcatttcatactctcaaaacaccaaacttcaaaaagttaattattgtcataatgcattattccatgtgtggtgtcaatacattttagcggacaaagaagaaacatgccagttaaaacatttctgctactggattctttattaattatttgagaacgttattttgctagttcttaaggttaagtttttcatcaaagactcaggtacctattattgttccctggtgaaactgaggagaaaagttaatcaaccaggttactcccacagtttgcccgtgtgttatgtatcagttatacaggtatcccaccaagttcaagtcaaaagaaattcctaactttgtatatttctggagctatataaacccctgatttaagaaaaaaaaaaaaaa

SEQ ID NO: 399 - DNA, 355 bp, Homo sapiens
  modified_base (331)..(331): a, c, t or g
  modified_base (344)..(344): a, c, t or g
  modified_base (350)..(350): a, c, t or g
tagaaattataagtagtggtatgctcataaatgtttaataaccacctctggcgggggtggggggttgttttgtaactttgccaatttctgtggtgtcaatacttctcaccatggtgatttcaaactacgaacatgacatcactgaatacagcagagttaagagatgggcatttgctcttataagctgttactatctggctccagcacatttccaattcatactctgctgtcaagggtacatcagaatggacatgtccatgtatttctggtatcaggattccgggagcgtggtccatcttgtgcatcattcaatttcctccgcccttcaccnggcacaccatgtnatcatnacgtt

SEQ ID NO: 400 - DNA, 315 bp, Homo sapiens
  modified_base (1)..(1): a, c, t or g
  modified_base (46)..(46): a, c, t or g
ntattagaaaacatacatatatacacacacatatacacagttttancctcaacaaaattatctgtatgttctcagaacagaaatattctgcctaaacattaaacacccttcctttctccatttccccaatctacatagtttgctacccagctagccaggcagctaaacacacatgtacatgcctcctattgggcgttgctatctaagatgtaccctgtgtaatttttaagcttatttccaaagacaagtatgagtaggggataagcagtaagagagttagagaaaagtttatatgacacaattcataattggtca

SEQ ID NO: 401 - DNA, 409 bp, Homo sapiens
  modified_base (9)..(9): a, c, t or g
  modified_base (377)..(377): a, c, t or g
  modified_base (407)..(407): a, c, t or g
ggatggggnaacagtacagccttatgaggttgtgagagttaaatgagataatatccagagtgcttagtaaactgtagagtcttatacagatgtttgctggtgaaattcatgttgttctggacacacattaactatcttggactgattctttaaggtcttctgaacaagattccagggtaacctcattttattctttcttggttattattaggggtgaacggttgggtaggtggtgttttaggcttttttttttttttttaattcttacctatgaaaaaaatattttcttatattttagatttaaatgactaccaagaagtttgctgattgctttcatttcgggtagtagagtacaagtttagttaattattatttcnctcctagtagagattttttttaaggaatcngg

SEQ ID NO: 402 - DNA, 4421 bp, Homo sapiens
ggcgccgacccatgctggctgggaacgtgtctcccggtgacgcagccccgggtggggaacgtggtgcggcggcggcggcggcggcgactgtacgcgcctccgccgcccccgagaggacgcgccgtgcagcggctgagtggcggcggcggcgacggcaaacccggagctgccggccggcgcgcgggaggaggacgcgggtgcggtctaggaagtaggtcccgggctccgcgctcaacaaagacggggccgcccccattagacggagctgcgggcggaggctccatgttgggaagcggcgccgttcgtgcttgttagcgggaatccgggagccgcggggtgagctggcgggggccgggccctaagtgaagatggaggccccgctgcggcctgccgcggacatcctgaggcggaacccgcagcaggactacgaactcgtccagagggtcggcagcggcacctacggggacgtctataaggccagaaatgtacacacaggagagctggctgcagtaaaaatcattaaattggagcctggagatgatttttctttgattcaacaagaaatatttatggttaaagaatgtaaacattgtaacatcgttgcctactttgggagttatcttagtcgggaaaaactatggatttgtatggaatactgtggtggcggatcacttcaagatatttaccatgttactggaccattatcagaattgcaaatagcctatgtatgcagagaaaccttacagggtcttgcctatttgcatactaaaggcaaaatgcatagagatatcaaaggtgctaatattttattgacagaccatggcgatgtaaaattagctgactttggtgtggctgcaaaaataacagctaccattgcaaaacgaaaatctttcattggcaccccttactggatggccccagaagttgcagcagtagagaagaatggtggctacaaccaactctgtgatatctgggcagtaggaataacagcaattgaacttggagaacttcagccacctatgtttgatctccacccaatgagggctctcttcttaatgtcaaaaagtaattttcagcctccaaaactaaaggacaaaacaaaatggtcatcaacattccataattttgtcaaaatagcactaaccaaaaacccaaaaaaaagaccaactgctgaaagacttctgactcacacttttgttgcacagccaggtctctctagagccctagcagttgaactgttagacaaagtgaacaatccagataaccacgcacattacactgaagcagatgacgatgactttgagccccatgcaatcattcgtcataccattagatctacaaacaggaatgccagagctgaacggacagcttcagaaataaattttgacaaattacaatttgaacctcctctgagaaaagaaacagaagcacgagatgaaatgggattgtcatcagacccaaatttcatgttacagtggaatccttttgttgatggtgcaaatactggcaaatcaacctcaaaacgtgcaataccacctcccctacctcctaagccaaggataagcagttaccctgaagacaactttccggatgaagaaaaagcatcaaccataaaacattgtcctgattcagaaagcagagctccccaaattctcagaagacagagtagcccaagttgtgggcctgtggcagagacttcttctattggaaatggtgatggtatttcaaaactgatgagtgaaaatacagaaggatcagcacaagcaccacagttaccacgaaaaaaggacaaacgagacttccctaaaccagccatcaatggccttccacccaccccaaaagttctgatgggagcatgcttttcaaaagtttttgatggctgtcctttgaaaattaattgtgcaacatcctggatacatcctgatacaaaagatcagtacattatttttggaactgaagatggtatttacacactgaatctcaatgagctacatgaggcaacgatggaacagttatttccacggaagtgtacttggctgtatgttatcaataatactttaatgtcattatcagaaggaaaaacctttcagctctactctcacaatcttatagctttgtttgaacatgccaaaaaaccaggattagctgcccatattcaaactcacaggtttccagaccgaatactaccaagaaaattcgctttaacaacaaagattcctgatacaaaaggctgccacaaatgttgcatagtcagaaacccttacacgggacataaatacctctgtggagctttacagtctggaattgttttacttcagtggtatgagccaatgcagaaattcatgttgataaagcactttgattttcctttgccaagtcctttgaatgtttttgaaatgctggtgatacctgaacaggaataccctatggtctgtgtagctattagcaaaggcactgaatcgaatcaggtagttcagtttgagacaatcaatttgaactctgcatcttcatggtttacagaaattggtgcaggcagccagcagttagattccattcatgtaacacagttggagagagataccgttttagtgtgtttagacaaatttgtgaaaattgtaaatctacaaggaaaattaaaatcaagtaagaaactggcctctgagttaagttttgattttcgcattgaatctgtagtatgccttcaagacagtgtgttggctttctggaaacatgggatgcagggtaaaagcttcaagtcagatgaggttacccaggagatttcagatgaaacaagagttttccgcttattaggatcagacagggttgtcgttttggaaagtaggccaacagaaaatcctactgcacacagcaatctctacatcttggctggacatgaaaatagttactaagcaacagaaactgatctcaaatgacaggaaaatgaatatactccattgaaaggaaaaataaggaaattcaatacaaactgcactatgatttgctttaactattatgggttatattgcaaatgatctgtactttagggtagaattcaatattttctgcagctggaaacagctagtctatctcttgccactgtgtggtggttatatcaagtttgcttaataaaagctatgagacaaatagtcctctagttccaggaaacacagtctttttttaaaaaaaacaatgtttgtaacaagggtgccatggtatttttagataactcgtgattatcttaagagaggtaaatttagtgatcattttatatcatgtcttattccttcttaatgaacataatttgttaaattctcaagcaaggttttcacttttatattggccattctgtatgtttttgtaaaacagaatatttaatccttatttattaatctcttgctggagtggtgtaatgtatctaacttttagcaaaggagggttgcagagcagcttaaattttttttataatgtataagaattttgtttatcttttaagagtagtaaagtactttgagtgtttgggggttcaacacacacatgcaattttgcttaacaaaagtattttataatacagtttcatacagaattaccttaaaagggagtcttatgttttcaactacagatagttgtaagggatcatacagaagatattgatgatagttgaaatattcttagaaggggtgtgtatgtctagctgtgtctaccatgtgtatgtattcttgacaagcagtataaaatacctgtgatttttctttacattagggataatgcataaggaattaatcttcatatatattatcatccctaatgtagcagggggaagtatttaattgcccatgatatgtattttacttatactatgccagagaggaaactataaagtaattacacatgtaatcttgggtttttcacatatgtaggtattcattttgagtaggttgaagaagaaaaaaaatatttaaatgaattgaattcctgatgggatagtatcaataagtatttaaaagccagtattctaaaaataataaagggtagggtcatttttgagtttgtttttcttttgctattgttaatattcaaaattaaagtgttacattggtacctgttgtcttaatgcatttattgagaacagcattgagatgatgaacaaggggttagcaatagcaaactctataattattttgactaattacttaagaggaaaacagtataagtatctcattcagtatttagcaattctgtaaaataagtattatctctatttttcagatgaggaagtaagggtttagcaaggttaagagatctatccaatttacacagcaagttagtagttgagcctgaccatgagtcttctgactctgttcttttcactatgcaatacgcaaacaataaaatgttatacaaataaaaaaaaaaaaaaaaaa

SEQ ID NO: 403 - DNA, 431 bp, Homo sapiens
  modified_base (22)..(22): a, c, t or g
  modified_base (101)..(101): a, c, t or g
  modified_base (106)..(106): a, c, t or g
  modified_base (109)..(109): a, c, t or g
  modified_base (188)..(188): a, c, t or g
  modified_base (217)..(217): a, c, t or g
  modified_base (233)..(233): a, c, t or g
  modified_base (352)..(352): a, c, t or g
  modified_base (421)..(421): a, c, t or g
  modified_base (426)..(426): a, c, t or g
gaaaggaaggcaaactctgccncccgctcagagtccccccaaccctcactgtttcccgttgccattgatggggaggttcacgtactcaggggaggccaggnaggcntgnagcttgggccgggcactgaggcgccccacatatgctgagagcagggggaacgcatccaggcagccagggctagggaccncatggatcagcagcaagtccagcaggttntagtcagcgaaggagntctggtctcccacaatgaaggtcttgcctccctggttctgggacagcagggtctcaaaaggcttcagttgcccgggcagtgccttcacatagtcatccttgcccgcctcatagttggtntagatgagggagatgtatttgcagcggaggtcctccacgccgttcatttcacctgtccaccagggctgnctccnttttt

SEQ ID NO: 404 - DNA, 305 bp, Homo sapiens
  modified_base (1)..(1): a, c, t or g
  modified_base (117)..(117): a, c, t or g
  modified_base (201)..(201): a, c, t or g
  modified_base (255)..(255): a, c, t or g
  modified_base (277)..(277): a, c, t or g
  modified_base (295)..(295): a, c, t or g
nattcggcacaggtcgccaccatgccgccctacaccgtggtctatttcccagttcgaggccgctgcctgtcggcaatgctgctggcagatcagggccagagctggaaggaggaggtngtgaccgtggagacgtggcaggagggctcactcaaagcctcctgcctatacgggcagctccccaagttccaggacggagacctnaccctgtaccagtccaataccatcctgcgtcacctgggccgcacccttgggctnctatgggaaggaccagcaggangcagccctggtggacatngtgaatgacg

SEQ ID NO: 405 - DNA, 737 bp, Homo sapiens
ggagtttcgccgccgcagtcttcgccaccatgccgccctacaccgtggtctatttcccagttcgaggccgctgcgcggccctgcgcatgctgctggcagatcagggccagagctggaaggaggaggtggtgaccgtggagacgtggcaggagggctcactcaaagcctcctgcctatacgggcagctccccaagttccaggacggagacctcaccctgtaccagtccaataccatcctgcgtcacctgggccgcacccttgggctctatgggaaggaccagcaggaggcagccctggtggacatggtgaatgacggcgtggaggacctccgctgcaaatacatctccctcatctacaccaactatgaggcgggcaaggatgactatgtgaaggcactgcccgggcaactgaagccttttgagaccctgctgtcccagaaccagggaggcaagaccttcattgtgggagaccagatctccttcgctgactacaacctgctggacttgctgctgatccatgaggtcctagcccctggctgcctggatgcgttccccctgctctcagcatatgtggggcgcctcagcgcccggcccaagctcaaggccttcctggcctcccctgagtacgtgaacctccccatcaatggcaacgggaaacagtgagggttggggggactctgagcgggaggcagagtttgccttcctttctccaggaccaataaaatttctaagagagct

SEQ ID NO: 406 - DNA, 608 bp, Homo sapiens
  modified_base (441)..(441): a, c, t or g
gaatttttatttagttaatttcataagctacagcagaggcgtggaccctgccctctccacacttgaagagataagcccctgggatccaagtcccagcaaggttggtgccacccatcttggtgaaagatgctgttgttcctgtggaaaccatcaccagaggtaggaagggctttgagcccaaaaggaaacaagagggcgtgaatccaggccatcctcaggggagggtgggagcccatcccaggcagagaggcctaagcctcagtgtgggccaaggctcaaaggtgctggcacaggcttcccagggagaacagaaactcagcagtgaaagccgcagaggggaagaagcaggctgatgtcaacagcgtggggctctgtccctcaccccaaggagagggagtgtgccagatcccaggccaccaagcggggccagctccagcctgngcgatcgtcccagcagctgagagggaagctttaagcagaccagtgggtaggagaggagggagcatgcggcaggtggggcagccacacaaaggagagttcccagaaggccaaggtgtggtcaccctccacgccttccgacttcctcctggagtggctgggcagcatgc

SEQ ID NO: 407 - DNA, 1421 bp, Homo sapiens
acttactgcgggacggccttggagagtactcgggttcgtgaacttcccggaggcgcaatgagctgcattaacctgcccactgtgctgcccggctcccccagcaagacccgggggcagatccaggtgattctcgggccgatgttctcaggaaaaagcacagagttgatgagacgcgtccgtcgcttccagattgctcagtacaagtgcctggtgatcaagtatgccaaagacactcgctacagcagcagcttctgcacacatgaccggaacaccatggaggcgctgcccgcctgcctgctccgagacgtggcccaggaggccctgggcgtggctgtcataggcatcgacgaggggcagtttttccctgacatcatggagttctgcgaggccatggccaacgccgggaagaccgtaattgtggctgcactggatgggaccttccagaggaagccatttggggccatcctgaacctggtgccgctggccgagagcgtggtgaagctgacggcggtgtgcatggagtgcttccgggaagccgcctataccaagaggctcggcacagagaaggaggtcgaggtgattgggggagcagacaagtaccactccgtgtgtcggctctgctacttcaagaaggcctcaggccagcctgccgggccggacaacaaagagaactgcccagtgccaggaaagccaggggaagccgtggctgccaggaagctctttgccccacagcagattctgcaatgcagccctgccaactgagggacctgcaagggccgcccgctcccttcctgccactgccgcctactggacgctgccctgcatgctgcccagccactccaggaggaagtcgggaggcgtggagggtgaccacaccttggccttctgggaactctcctttgtgtggctgccccacctgccgcatgctccctcctctcctacccactggtctgcttaaagcttccctctcagctgctgggacgatcgcccaggctggagctggccccgcttggtggcctgggatctggcacactccctctccttggggtgagggacagagccccacgctgttgacatcagcctgcttcttcccctctgcggctttcactgctgagtttctgttctccctgggaagcctgtgccagcacctttgagccttggcccacactgaggcttaggcctctctgcctgggatgggctcccaccctcccctgaggatggcctggattcacgccctcttgtttccttttgggctcaaagcccttcctacctctggtgatggtttccacaggaacaacagcatctttcaccaagatgggtggcaccaaccttgctgggacttggatcccaggggcttatctcttcaagtgtggagagggcagggtccacgcctctgctgtagcttatgaaattaactaatt

SEQ ID NO: 408 - DNA, 568 bp, Homo sapiens
  modified_base (464)..(464): a, c, t or g
cacagtacattttttattctgtgttgaaaatgtacaaaatatccccacttcccttgagaaagagtatatctaaaatacactttgatgaacacagaatattaaaacattatatgctatagaagtgaacacaaatacattttctccaaaatttcaatagtctaaggaatatataagcattgataatatgaaggaaaatgtttggatttatttttaaattcaaaattctcctggttgtagaggtgaaaaagtaatcaggttaccaccaaaagaaatgtgtctggcatgttcttgatgtctcctctccagctgagtaaatggattactgcagtttagacctggctgtagtcccagctactcgggaggctgaggtggtaggatcacttgaacccaggacttcaagaccagcccgagcaacatagcaagatcccactgaatcaagaaggtggcattcagtagtgagactnttattatcaaatagttctgactgagaaattttagtattaatatcatctgctactccaccagcaagaagaggcaaactcattctctcactggataaacaatccac

SEQ ID NO: 409 - DNA, 286 bp, Homo sapiens
  modified_base (19)..(19): a, c, t or g
  modified_base (41)..(42): a, c, t or g
  modified_base (53)..(53): a, c, t or g
  modified_base (58)..(58): a, c, t or g
  modified_base (109)..(109): a, c, t or g
  modified_base (170)..(170): a, c, t or g
  modified_base (215)..(215): a, c, t or g
aaaaaataatctttattgncactagtataaaacagagcagnncaactggcctntcggnctgtacaaagtgtggggcgtgaaaccgctgggctgcccccacttctcccanaattccctgccctagagcagcacctccagagctaggagaaggagagggggccacccaaggncttcccttgaggagaggggtcaggagtggactggagtgggggctnttttctatctgagggaggcaaagaagcagaggagaaaactggagtgggcggaaccctcccgccctcgtgcc

SEQ ID NO: 410 - DNA, 253 bp, Homo sapiens
  modified_base (138)..(138): a, c, t or g
  modified_base (154)..(154): a, c, t or g
tgcctccctcagatagaaaacagcccccactccagtccactcctgacccctctcctcaagggaaggccttgggtggccccctctccttctcctagctctggaggtgctgctctagggcagggaattatgggagaagtnggggcagcccaggcgntttcacgcccacactttgtacagaccgagaggccagttgatctgctctgttttatactagtgacaataaagattattttttgatacaaaaaaaaaaaaa

SEQ ID NO: 411 - DNA, 2205 bp, Homo sapiens
cacagggctcccccccgcctctgacttctctgtccgaagtcgggacaccctcctaccacctgtagagaagcgggagtggatctgaaataaaatccaggaatctgggggttcctagacggagccagacttcggaacgggtgtcctgctactcctgctggggctcctccaggacaagggcacacaactggttccgttaagcccctctctcgctcagacgccatggagctggatctgtctccacctcatcttagcagctctccggaagacctttggccagcccctgggacccctcctgggactccccggccccctgatacccctctgcctgaggaggtaaagaggtcccagcctctcctcatcccaaccaccggcaggaaacttcgagaggaggagaggcgtgccacctccctcccctctatccccaaccccttccctgagctctgcagtcctccctcacagagcccaattctcgggggcccctccagtgcaagggggctgctcccccgcgatgccagccgcccccatgtagtaaaggtgtacagtgaggatggggcctgcaggtctgtggaggtggcagcaggtgccacagctcgccacgtgtgtgaaatgctggtgcagcgagctcacgccttgagcgacgagacctgggggctggtggagtgccacccccacctagcactggagcggggtttggaggaccacgagtccgtggtggaagtgcaggctgcctggcccgtgggcggagatagccgcttcgtcttccggaaaaacttcgccaagtacgaactgttcaagagctccccacactccctgttcccagaaaaaatggtctccagctgtctcgatgcacacactggtatatcccatgaagacctcatccagaacttcctgaatgctggcagctttcctgagatccagggctttctgcagctgcggggttcaggacggaagctttggaaacgctttttctgtttcttgcgccgatctggcctctattactccaccaagggcacctctaaggatccgaggcacctgcagtacgtggcagatgtgaacgagtccaacgtgtacgtggtgacgcagggccgcaagctctacgggatgcccactgacttcggtttctgtgtcaagcccaacaagcttcgaaatggacacaaggggcttcggatcttctgcagtgaagatgagcagagccgcacctgctggctggctgccttccgcctcttcaagtacggggtgcagctgtacaagaattaccagcaggcacagtctcgccatctgcatccatcttgtttgggctccccacccttgagaagtgcctcagataataccctggtggccatggacttctctggccatgctgggcgtgtcattgagaacccccgggaggctctgagtgtggccctggaggaggcccaggcctggaggaagaagacaaaccaccgcctcagcctgcccatgccagcctccggcacgagcctcagtgcagccatccaccgcacccaactctggttccacgggcgcatttcccgtgaggagagccagcggcttattggacagcagggcttggtagacggcctgttcctggtccgggagagtcagcggaacccccagggctttgtcctctctttgtgccacctgcagaaagtgaagcattatctcatcctgccgagcgaggaggagggtcgcctgtacttcagcatggatgatggccagacccgcttcactgacctgctgcagctcgtggagttccaccagctgaaccgcggcatcctgccgtgcttgctgcgccattgctgcacgcgggtggccctctgaccaggccgtggactggctcatgcctcagcccgccttcaggctgcccgccgcccctccacccatccagtggactctggggcgcggccacaggggacgggatgaggagcgggagggttccgccactccagttttctcctctgcttctttgcctccctcagatagaaaacagcccccactccagtccactcctgacccctctcctcaagggaaggccttgggtggccccctctccttctcctagctctggaggtgctgctctagggcagggaattatgggagaagtgggggcagcccaggcggtttcacgccccacactttgtacagaccgagaggccagttgatctgctctgttttatactagtgacaataaagattattttttgatac

SEQ ID NO: 412 - DNA, 403 bp, Homo sapiens
  modified_base (94)..(94): a, c, t or g
  modified_base (139)..(139): a, c, t or g
  modified_base (190)..(190): a, c, t or g
  modified_base (216)..(216): a, c, t or g
  modified_base (274)..(274): a, c, t or g
  modified_base (346)..(346): a, c, t or g
  modified_base (389)..(389): a, c, t or g
ttattgtaaaataagagatcgatataaaaatgggatataaaaagggagaaggaggggaagggtggggtgaaaatgcagatgtgcttgcagaatntaaaagatgttgacccttccagctggacgtggtggctcacaattntaatcccagcactctgggaggctgagacaggtggatcgcctgagcccaggngtttgagaccagcctgggcaacactntgagaccccatctctacaaaacatgcaaaagttggctggccatggtggcatgaacctntggtcccagctactccggaggctgaggcaggactgctcgagccggggaggcaaaggctgcagtaagccaagntcacgccactccattccagcctgggcaacaaagcgagacccanttttcaaagaaaaa

SEQ ID NO: 413 - DNA, 368 bp, Homo sapiens
  modified_base (233)..(233): a, c, t or g
  modified_base (296)..(296): a, c, t or g
  modified_base (317)..(317): a, c, t or g
  modified_base (322)..(322): a, c, t or g
  modified_base (336)..(336): a, c, t or g
acagttcctgcatgggcggcatgaaccggagcccatcctcaccatcatcacactggaagactccagtggtaatctactgggacggaacagctttgaggtgcgtgtttgtgcctgtcctgggagagaccggcgcacagaggaagagaatctccgcaagaaaggggagcctcaccacgagctgcccccagggagcactaagcgagcactgcccaacaacaccagctcctctcccnagccaaagaagaaaccactggatggagaatatttcacccttcagatccgtgggcgtgaggctntcgagatgttccgagagctgnaatgnaggccttggaactnaaggatgtccaggctgggaaggagccaggggg

SEQ ID NO: 414 - DNA, 2629 bp, Homo sapiens
acttgtcatggcgactgtccagctttgtgccaggagcctcgcaggggttgatgggattggggttttcccctcccatgtgctcaagactggcgctaaaagttttgagcttctcaaaagtctagagccaccgtccagggagcaggtagctgctgggctccggggacactttgcgttcgggctgggagcgtgctttccacgacggtgacacgcttccctggattggcagccagactgccttccgggtcactgccatggaggagccgcagtcagatcctagcgtcgagccccctctgagtcaggaaacattttcagacctatggaaactacttcctgaaaacaacgttctgtcccccttgccgtcccaagcaatggatgatttgatgctgtccccggacgatattgaacaatggttcactgaagacccaggtccagatgaagctcccagaatgccagaggctgctccccgcgtggcccctgcaccagcagctcctacaccggcggcccctgcaccagccccctcctggcccctgtcatcttctgtcccttcccagaaaacctaccagggcagctacggtttccgtctgggcttcttgcattctgggacagccaagtctgtgacttgcacgtactcccctgccctcaacaagatgttttgccaactggccaagacctgccctgtgcagctgtgggttgattccacacccccgcccggcacccgcgtccgcgccatggccatctacaagcagtcacagcacatgacggaggttgtgaggcgctgcccccaccatgagcgctgctcagatagcgatggtctggcccctcctcagcatcttatccgagtggaaggaaatttgcgtgtggagtatttggatgacagaaacacttttcgacatagtgtggtggtgccctatgagccgcctgaggttggctctgactgtaccaccatccactacaactacatgtgtaacagttcctgcatgggcggcatgaaccggaggcccatcctcaccatcatcacactggaagactccagtggtaatctactgggacggaacagctttgaggtgcgtgtttgtgcctgtcctgggagagaccggcgcacagaggaagagaatctccgcaagaaaggggagcctcaccacgagctgcccccagggagcactaagcgagcactgcccaacaacaccagctcctctccccagccaaagaagaaaccactggatggagaatatttcacccttcagatccgtgggcgtgagcgcttcgagatgttccgagagctgaatgaggccttggaactcaaggatgcccaggctgggaaggagccaggggggagcagggctcactccagccacctgaagtccaaaaagggtcagtctacctcccgccataaaaaactcatgttcaagacagaagggcctgactcagactgacattctccacttcttgttccccactgacagcctcccacccccatctctccctcccctgccattttgggttttgggtctttgaacccttgcttgcaataggtgtgcgtcagaagcacccaggacttccatttgctttgtcccggggctccactgaacaagttggcctgcactggtgttttgttgtggggaggaggatggggagtaggacataccagcttagattttaaggtttttactgtgagggatgtttgggagatgtaagaaatgttcttgcagttaagggttagtttacaatcagccacattctaggtaggtaggggcccacttcaccgtactaaccagggaagctgtccctcatgttgaattttctctaacttcaaggcccatatctgtgaaatgctggcatttgcacctacctcacagagtgcattgtgagggttaatgaaataatgtacatctggccttgaaaccaccttttattacatggggtctaaaacttgacccccttgagggtgcctgttccctctccctctccctgttggctggtgggttggtagtttctacagttgggcagctggttaggtagagggagttgtcaagtcttgctggcccagccaaaccctgtctgacaacctcttggtcgaccttagtacctaaaaggaaatctcaccccatcccacaccctggaggatttcatctcttgtatatgatgatctggatccaccaagacttgttttatgctcagggtcaatttcttttttcttttttttttttttttttctttttctttgagactgggtctcgctttgttgcccaggctggagtggagtggcgtgatcttggcttactgcagcctttgcctccccggctcgagcagtcctgcctcagcctccggagtagctgggaccacaggttcatgccaccatggccagccaacttttgcatgttttgtagagatggggtctcacagtgttgcccaggctggtctcaaactcctgggctcaggcgatccacctgtctcagcctcccagagtgctgggattacaattgtgagccaccacgtggagctggaagggtcaacatcttttacattctgcaagcacatctgcattttcaccccacccttcccctccttctccctttttatatcccatttttatatcgatctcttattttacaataaaactttgctgcca

SEQ ID NO: 415 - DNA, 385 bp, Homo sapiens
ttaatcctaattgtatttctctattcctgaagagttctgtaacatgatgtgttgattggttgtgttaatgttggtccctggaataagattctcatcatctccttcaatcaagcagtcccactgatcaaaatctttatgaagtcctaaatgcttttgtaagaatgctaatgaagctttgttgctaaggatcaatagctgcatttgaatctatgtctccctttaatttgaggcatgtgtccaattattttgccagttgcaaaaggtgaagtcaggcaaaattctgggtgggactggaacccctggattggtaatcatctttctttctttatcgggtgaggtaggccatttttttcatttttatggatataggccggggtattggggg

SEQ ID NO: 416 - DNA, 433 bp, Homo sapiens
  modified_base (314)..(314): a, c, t or g
  modified_base (320)..(320): a, c, t or g
  modified_base (360)..(360): a, c, t or g
  modified_base (365)..(365): a, c, t or g
  modified_base (377)..(377): a, c, t or g
  modified_base (389)..(389): a, c, t or g
  modified_base (412)..(412): a, c, t or g
  modified_base (418)..(418): a, c, t or g
  modified_base (424)..(424): a, c, t or g
ccctctgaggcctggtgaaaaatatccacttgttgttttttctcatggtcttggggcattcaggacactttattctgctattggcattgacctggcatctcatgggtttatagttgctgctgtagaacacagagatagatctgcatctgcaacttactatttcaaggaccaatctgctgcagaaatagggggacaagtcttgggctctaccttaggaaccctgaaacaagagggagggagacacatatacggaaattgaggcaggtacgggcaaaggagccaaaaggatttttcccccaagctcttcagtgctngattcntttgacatttgatccatgggggaaagcccagttgaaggantggcntttaggattttnaaagtttttggntattggggaccaccttgaagggnctcttnttttgntaggggggg

SEQ ID NO: 417 - DNA, 1561 bp, Homo sapiens
cgcacgccacccgcccgccgcctgccagagctgctcggcccgcagccagggggacagcggctggtcggaggctcgcagtgctgtcggcgagaagcagtcgggtttggagcgcttgggtcgcgttggtgcgcggtggacacgagggaccccagttcccgcgagcagctccgcgccggccctgagagactaagctgaaactgctgctcagctcccaagatggtgccacccaaattgcatgtgcttttctgcctctgcggctgcctggctgtggtttatccttttgactggcaatacataaatcctgttgcccatatgaaatcatcagcatgggtcaacaaaatacaagtactgatggctgctgcaagctttggccaaactaaaatcccccggggaaatgggccttattccgttggttgtacagacttaatgtttgatcacactaataagggcaccttcttgcgtttatattatccatcccaagataatgatcgccttgacaccctttggatcccaaataaagaatatttttggggtcttagcaaatttcttggaacacactggcttatgggcaacattttgaggttactctttggttcaatgacaactcctgcaaactggaattcccctctgaggcctggtgaaaaatatccacttgttgttttttctcatggtcttggggcattcaggacactttattctgctattggcattgacctggcatctcatgggtttatagttgctgctgtagaacacagagatagatctgcatctgcaacttactatttcaaggaccaatctgctgcagaaataggggacaagtcttggctctaccttagaaccctgaaacaagaggaggagacacatatacgaaatgagcaggtacggcaaagagcaaaagaatgttcccaagctctcagtctgattcttgacattgatcatggaaagccagtgaagaatgcattagatttaaagtttgatatggaacaactgaaggactctattgatagggaaaaaatagcagtaattggacattcttttggtggagcaacggttattcagactcttagtgaagatcagagattcagatgtggtattgccctggatgcatggatgtttccactgggtgatgaagtatattccagaattcctcagcccctcttttttatcaactctgaatatttccaatatcctgctaatatcataaaaatgaaaaaatgctactcacctgataaagaaagaaagatgattacaatcaggggttcagtccaccagaattttgctgacttcacttttgcaactggcaaaataattggacacatgctcaaattaaagggagacatagattcaaatgcagctattgatcttagcaacaaagcttcattagcattcttacaaaagcatttaggacttcataaagattttgatcagtgggactgcttgattgaaggagatgatgagaatcttattccagggaccaacattaacacaaccaatcaacacatcatgttacagaactcttcaggaatagagaaatacaattaggattaaaataggtttttta

SEQ ID NO: 418 - DNA, 315 bp, Homo sapiens
  modified_base (4)..(4): a, c, t or g
  modified_base (268)..(268): a, c, t or g
  modified_base (284)..(284): a, c, t or g
  modified_base (297)..(297): a, c, t or g
ttanataaacagctttatttgccttgtacagcatcaattttcttacattctcagttaattggccattaaagtgctggaaattttcttaatcatgataacatttgttaaaaagaaatcagaactaatatcaggaacatggcggcatgaaggaaacagttcccttacaaaacacagaaaatggaagcccctcatgttgaggggggtggggttggacaatttgcaaacagattctaatttcctctcaccgtcagcaccaaactggctgggnccaccacccctggggngaaagggaaccancactaagggacccctaaa

SEQ ID NO: 419 - DNA, 372 bp, Homo sapiens
  modified_base (283)..(283): a, c, t or g
  modified_base (293)..(293): a, c, t or g
agcaaacgcccacagatggcccagaggtggtggtagtcagggtgtgtgggtgtttttagggttctttagtgttgtttctttcacccaggggtggtggtcccagccagtttggtgctgacggtgagaggaaattagaatctgtttgcaaattgtccaacccaccccctcaacatgaggggcttccattttctgtgttttgtaagggaactgtttccttcatgccgccatgttcctgatattagttctgatttctttttaacaatgttatcatgattaaggaaantttccagcantttaatgggccaattaactgaggatgtaagaaaattggatgctgtacaaggcaattaaagctgtttatttaacctttaa

SEQ ID NO: 420 - DNA, 18815 bp, Homo sapiens
agacccgcccgcccgagccggagttacaagagccgcctccgcgcacgggggcccggccactcggagctgctctgccgcggggactgcaccgcccgccctgccagacccgcccggaacggggctcgtcgccgccagtagccgcagcaccgcagccttgggcctcgcgccggctatggccgtgccctggggctgagccctcaggttgtgaccgagattcccgacgagagagactgaggggaagagaggaaggaggggcgggctcctggcaaggcattcgctcctgagcggaatcctgcaaagatggagaaggaggagacaacccgggagctgctgctgcccaactggcagggtagtggctcccacgggctgaccatcgcccagagggacgacggcgtctttgtgcaggaggtgacgcagaactcccctgcggcccgcactggggtggtcaaggagggggaccagattgtgggtgccaccatctactttgacaacctgcagtcgggtgaggtgacccagctgctgaacaccatggggcaccacacggtgggcctgaagctgcaccgcaagggggaccgctctcccgagcctggccagacctggacccgtgaagtcttcagctcctgcagctctgaagtggttctgagcggggatgatgaggagtaccagcgcatctacaccacgaagatcaagccacggctgaagtcggaagatggagtggaaggagacctcggggagacccagagccgtaccatcacagtgaccagaagggtcacggcctacactgtggatgtgactggccgggaaggagccaaggacatagacatcagtagccctgaattcaagatcaagattccaagacatgaactgactgaaatctccaatgtggatgtggagacccagtctgggaagaccgtgatcagactgccctcgggctcgggggcagcctctccgacaggctctgctgtggatatccgagcaggggccatttctgcttcaggaccagagctccaaggtgctggccactcgaagctccaggtcaccatgcctgggataaaggtgggaggctcaggtgtcaatgtcaatgcaaagggcttggacttgggtggcagaggaggggtccaagttccagcagtggacatttcatcttctcttgggggtagggcagtagaggtacagggcccatctctggagagtggtgatcatggcaaaattaaatttcccaccatgaaagtgccgaaatttggtgtctcaacagggcgtgagggccagacaccaaaggcagggctgagggtttctgcacctgaagtctctgtggggcacaagggcggcaagccaggcttgactatccaagcccctcagctggaagtcagtgtgccctctgccaatattgagggccttgaggggaagctgaagggcccccaaatcactgggccatcacttgagggtgacctaggcctgaaaggtgccaagccacaggggcacattggggtggatgcctctgctccccaaattgggggtagcatcactggccccagtgtggaagttcaggcccctgacattgatgttcaggggcctgggagcaaactgaatgtgcccaagatgaaagtccccaagttctctgtatcaggtgcaaagggagaggaaactgggattgatgtgacactgcctacaggtgaagtgactgttcctggggtctctggggatgtcagcctgcctgagattgctactggtgggctggaaggaaagatgaaaggtactaaagtgaagactcctgaaatgattattcagaaacctaaaatctccatgcaggatgtggatctgagccttgggtctcctaaactgaaaggagatattaaggtttctgctcctggggtgcaaggtgatgttaaaggccctcaagtggcacttaaaggctccagagtggacatagagacaccaaacctagagggaaccttgacaggccctaggcttggcagtccttccgggaaaaccggaacctgtaggatctctatgtcagaagtagacttaaatgtggccgcacctaaagtgaaagggggtgtagatgtcacactccccagagtagaagggaaagtcaaagtccctgaagttgatgtcagaggccccaaagtggatgtcagtgccccagatgtcgaagcgcatggcccagaatggaacctgaaaatgcccaagatgaaaatgcccacgttcagcactccaggagccaaaggggaaggtccagatgttcatatgactctacccaaaggagatatcagtatttcagggcccaaggtcaatgtggaagccccagatgtcaacttggagggtctggggggaaaacttaaaggccccgatgttaagctgcctgatatgagtgtcaagacaccaaagatctccatgcctgatgtagatttgcacgtgaaaggtacaaaggtgaagggagagtatgatgtaactgtaccaaagctggaaggagaactcaaaggcccaaaagtggacattgatgccccagatgtggatgttcatggcccagactggcacttgaagatgcccaagatgaaaatgcccaaattcagtgtgccagggttcaaagcagagggcccagaagtggatgtgaacctgcccaaggctgatgtggacatttccgggcccaagatagatgttactgctcctgatgtgagcattgaggaaccagaagggaaattgaaagggcccaagtttaagatgcctgagatgaacatcaaagtccccaagatctccatgcctgatgtggacttacatctgaaaggccctaacgtaaagggagaatatgatgtcacaatgccaaaggttgaaagtgagattaaagttcctgatgttgaacttaaaagtgccaaaatggacattgatgtcccagatgtggaggttcaaggcccagactggcacctgaagatgcccaagatgaaaatgcccaagttcagcatgcctggcttcaaagcagagggcccagaagtggatgtgaacctgcccaaggctgatgtggacatctcaggacccaaggtgggtgttgaagttccagatgtgaatattgaaggacctgaaggaaagctgaagggccccaagttcaagatgccagagatgaatatcaaggcccccaagatctccatgcctgatgtggacttgcatatgaaaggtcctaaagtaaagggagaatatgatatgacagtgccaaagctggaaggggacctgaaaggcccaaaagtagatgtcagtgccccagatgttgaaatgcagggtcctgactggaacttgaagatgccaaagattaaaatgcccaaatttagcatgcccagcctcaaaggagaggggccagaatttgatgtgaacctgtccaaagcgaatgtggacatttctgcaccaaaagtagatactaatgctccagatctgagccttgaaggacctgaagggaagttgaaaggcccgaagtttaagatgcctgagatgcacttcagagctcctaagatgtctttgccagatgttgacctggatcttaaaggacccaaaatgaaaggaaatgtagatatctctgcaccaaagatagagggtgaaatgcaggttccagatgtggacatcagaggtcccaaggtagatattaaagcaccagatgtggaaggccaaggcctggactggagcctgaaaatacccaagatgaaaatgcccaagttcagcatgcccagcctcaaaggcgagggcccagaagtggatgtgaacttgcctaaggctgacgttgttgtctcaggacccaaggtggacatcgaagccccagatgtgagcctcgaaggtccagaagggaagctgaagggtcccaagtttaagatgcctgagatgcatttcaagacccccaagatctccatgcctgatgtggacttacacttgaaaggccccaaagtcaaaggggatgtggatgtgtctgtgcccaaggtagaaggtgaaatgaaagtgccagatgttgaaatcaaaggacccaaaatggacattgatgccccagatgtggaggttcaaggcccagactggcacctgaagatgcccaagatgaaaatgcccaagtttagcatgcctggcttcaaaggagagggccgagaagtggatgtgaacctgcccaaggctgacattgatgtctcaggacccaaggtggatgttgaagtcccagatgtgagccttgagggcccggaaggaaagctgaagggccccaagtttaagatgcctgagatgcacttcaaggcccccaagatctccatgcctgatgtggacctgaatcttaaggggccaaaattgaagggagatgtggatgtgtccttgcctgaggtagaaggtgaaatgaaagtgccagatgttgacattaaagggcccaaagttgacattagtgctccagatgtggatgttcatggcccagattggcacctgaagatgcccaaggtgaaaatgcccaagttcagcatgcccggcttcaaaggagagggccctgaagtggatgtgaagctgcccaaagctgacgttgatgtctcaggacccaaaatggatgctgaagttccagatgtgaatattgaaggtccagacgcaaaactaaaaggtcccaaattcaagatgccagaaatgagtataaagcctcagaagatatccataccagatgttggtttgcatttgaaaggtcctaaaatgaaaggagattatgatgtaacagttccaaaagtagaaggagagataaaagctcctgatgttgacatcaaaggccccaaagttgatattaatgcaccagatgtggaggttcatggcccagactggcacctgaagatgcccaaggtaaaaatgcccaagttcagcatgcctggctttaaaggagagggcccagaggtggatatgaacctgcccaaggctgaccttggtgtttcaggacccaaggtggacattgatgttccagatgtgaatcttgaagctccagaggggaaactaaaaggccctaagttcaagatgccaagcatgaatatacagacgcacaaaatctctatgcctgatgttggacttaatttgaaagcccctaaactgaaaactgatgtagatgtttcccttcccaaagtggaaggagacttgaagggtcctgaaattgatgtgaaagcccctaagatggatgtgaatgttggtgatattgatattgaaggtccagaagggaagttgaagggccccaagtttaagatgcctgagatgcatttcaaggcccccaagatctccatgcccgatgtggacttacacttgaaaggccccaaagtcaaaggggatatggatgtgtctgtgcccaaggtagaaggtgaaatgaaagtgccagatgttgacattaaagggcccaaagtggacattgatgccccagatgtggaggttcacgacccagattggcacctgaaaatgcccaagatgaaaatgcccaagttcagtatgcctggcttcaaagcagagggccctgaagtggatgtgaatctgccaaaggctgacattgatgtgtctggacccagtgtggacactgatgctcctgatttggatattgagggaccagaaggaaagttgaaaggctccaaatttaagatgcccaagttgaatataaaagctcccaaggtctccatgccagatgtggacttgaatttgaagggacccaaactgaagggagagatagatgcttctgtgccagaactggaaggtgatctcagagggccgcaagttgatgtcaaaggtccttttgtggaagcggaggtgcccgatgttgatctggagtgtcctgatgcaaagttgaaagggcccaagtttaagatgcctgagatgcacttcaaggcccccaagatctccatgcctgatgtggacttacacctgaaaggccccaaagtcaaaggggatgcggatgtgtcggtgccaaaattggagggagatttaacaggccccagtgtgggtgtggaggtgcctgatgttgagctggagtgtcctgatgcaaagttgaaaggccctaaatttaagatgccagacatgcacttcaaggcccccaagatctccatgcctgatgtggacttacacttgaaaggccccaaagtcaaaggggatgtggatgtgtcggtgccaaaattggagggagatttaacaggtcccagtgtgggtgtggaggtgcctgatgttgagctggagtgtcctgatgcaaagttgaaagggcccaagtttaagatgcctgagatgcacttcaagacccccaagatctccatgcctgatgtggacttacacctgaaaggccccaaagtcaaaggggatatggatgtgtctgtgcccaaggtagaaggtgaaatgaaagtgccagatgttgacatcaaaggacccaaaatggacattgatgccccagatgtggatgttcatggcccagactggcacctgaagatgcccaagatgaaaatgcccaagttcagcatgcctggcttcaaagcagagggcccagaagtggatgtgaacttgcccaaggctgatgttgttgtctcaggacccaaggtggatgttgaagtcccagatgtgagccttgaaggtccagaagggaagctgaagggccccaagcttaagatgcctgagatgcacttcaaggcccccaagatctccatgcctgatgtggacttacacttgaaaggccccaaagtcaaaggggatgtggatgtgtctttgccaaaattggagggagatttaacaggccccagtgtggatgtggaggtgcctgatgttgagctggagtgtcctgatgcaaagttgaaagggcccaagtttaagatgcctgagatgcacttcaagacccccaagatctccatgcctgatgtgaacttaaacttgaaaggccccaaagtcaaaggggatatggatgtgtctgttcccaaggtagaaggtgaaatgaaagtgccagatgttgacatcagagggcccaaagtggacattgatgccccagatgtggatgttcatggcccagactggcacctgaagatgcctaagatgaaaatgcccaagttcagcatgcctggcttcaaaggagagggcccagaagtggatgtgaacttgcccaaggctgacgttgatgtctcaggacccaaggtggatgttgaagtcccagatgtgagccttgaaggtccagaagggaagctgaagggccccaagtttaagatgcctgagatgcacttcaagacccccaagatctccatgcctgatgttgatttcaatttaaagggacccaaaatcaaaggagatgttgatgtttctgccccaaagctggagggagagttaaaaggtccagaattggatgtcaaaggtcccaaattagatgctgacatgccagaagtagctgtggaaggcccaaatggcaagtggaaaactcctaagttcaagatgccagatatgcactttaaagctcccaaaatctctatgccagacctcgatctacacttgaagagccccaaggcaaaaggagaggtggatgtagatgttcccaaattggaaggggaccttaaagggccacatgtggatgtcagtgggccagacattgacattgagggaccagagggcaaattgaaaggccctaagttcaagatgcctgatatgcatttcaaagcccccaatatttctatgcctgatgttgatctaaatctcaaaggacccaaaatcaagggggatgtggatgtgtctgtgcctgaggtagaaggtaaacttgaagtaccagatatgaacatcaggggccccaaagttgatgtaaatgcccccgatgtccaagctccagactggcacctgaagatgcccaagatgaaaatgcccaagttcagcatgcctggcttcaaagcagagggccctgaagtagacgtcaacttgcctaaggctgacgttgacatctcaggacccaaggtggacattgaaggccctgatgttaatattgaaggaccagagggaaagttgaaagggcctaagttaaagatgccagagatgaacatcaaagcccccaagatctccatgcctgactttgatttgcatctgaaaggtcccaaggtgaagggcgatgtggatgtttctctgcccaaagtggaaggtgacctcaagggccccgaagttgacatcaaggggcccaaagtggatattaatgccccagatgtgggtgttcaaggcccagactggcacctgaagatgcccaaggtgaaaatgccaaagttcagcatgcctggcttcaaaggagagggcccagatggggatgtgaagctgcccaaggctgacattgatgtctcaggacccaaagtggacattgaaggccctgatgttaacattgaaggaccagagggaaagttgaaagggcctaagttcaagatgccagagatgaatatcaaagcccccaagatctccatgcctgatattgacttaaacctgaaaggacccaaagtgaagggtgatgtggatgtttcccttcctaaagtggaaggtgacctcaagggcccagaagttgacatcaagggcccaaaagtggacattgacgcacctgatgttgatgttcatggcccagactggcacctaaagatgcccaagataaaaatgcccaagatcagcatgcctggcttcaaaggagaaggtccagatgtggacgtgaacctgcccaaggctgacattgatgtctcaggaccgaaagtggatgttgaatgtcccgatgtgaatatcgaaggacctgaaggaaagtggaaaagtccaaagtttaagatgccagagatgcattttaagactccaaagatatccatgccagatattgacctgaatctcacaggtccaaaaataaaaggagatgtggatgttacaggccctaaggtagagggagatctgaaaggtcctgaagttgacctcaaaggccccaaagtggacattgatgtcccagatgttaatgttcagggtccagactggcacctgaagatgcccaagatgaaaatgcccaagttcagcatgcctggcttcaaagcagagggccctgaagtggatgtgaacctgcccaaggctgacgttgatgtctcaggccccaaagtggacgttgaaggccctgatgttaacattgaaggaccagagggaaagttgaaagggcccaagttcaagatgccagagatgaatatcaaagcccccaagatccccatgcctgactttgatttgcatctgaaaggtcccaaggtgaagggcgatgtggatatttctctgcccaaagtggaaggtgacctcaagggccctgaagttgacatcaggggtccccaagtggacattgatgtcccggatgtgggcgttcaaggcccagactggcacctaaaaatgcccaaagtgaaaatgcccaaattcagcatgcctggcttcaaaggagagggcccagatgtggatgtgaacctgcccaaggctgaccttgatgtctcaggacccaaggtggacattgatgttccagatgtgaatatcgaaggcccagagggaaagttgaaaggtcccaaattcaaaatgcctgagatgaacatcaaagcccccaagatctccatgcctgacattgatcttaacctgaaaggtcccaaagtgaagggtgacatggatgtgtctctgccaaaagtggaaggtgacatgaaagttcctgacgtggatattaaaggccccaaagtggatattaatgccccagatgtggatgttcaaggcccagactggcacctgaagatgcctaaaataaaaatgcccaagatcagcatgcctggcttcaaaggagaaggtccagaagtggacgtgaacctgcccaaggctgaccttgacgtctcaggacccaaggtggacgttgatgttccagatgtgaatattgaaggtccagatgcgaaactgaagggccctaaattcaagatgccagagatgaacatcaaagctcctaaaatatcaatgcctgatttggacctcaatcttaaaggccctaaaatgaaaggagaggtggatgtttcacttgcaaatgtagaaggtgatttgaaaggacctgctcttgacataaaaggcccaaagatagatgtagatgctccagatattgacattcatggcccagatgccaaattaaaaggtccaaaactgaagatgcctgacatgcatgtaaacatgcccaagatctccatgccagaaattgacttgaatttgaaaggctcaaagcttaagggagatgttgatgtctctgggcccaagttggaaggtgacattaaagctcccagtttggatataaagggcccagaagtggacgtttccggtcctaagcttaatatcgaaggcaagtcaaagaaatctcgttttaagcttcccaaatttaatttttcgggctctaaagttcagacacctgaagtggatgtcaaaggtaaaaagccagatattgacataacaggtccaaaagttgatattaatgctcctgatgtcgaggtccaaggaaaagtgaaaggatccaagtttaaaatgcctttcctgagtatttcatctcccaaagtttctatgcctgacgtggagctaaatttgaaaagtcccaaagtcaaaggagacttagatattgcaggtcccaatttagaaggtgactttaaaggccccaaagtggatattaaggcaccagaagtcaatcttaatgcacctgatgtggatgttcatggtccagactggaatctgaaaatgcccaagatgaaaatgcccaaattcagtgtgtctggcttaaaagcagaagggccagatgtagctgtggatctaccaaaaggagacatcaacatagagggcccaagtatgaacattgagggcccagatctcaatgtggaaggtccggagggaggcttgaaaggtcccaaattcaagatgcctgacatgaatatcaaagctcccaagatctccatgcctgacattgacttaaacttgaaaggccccaaggtgaaaggtgatgtggatatttctcttcccaaacttgaaggggatctgaaagggccagaggttgatatcaaaggccctaaagtggacatcaatgccccagatgtggatgttcatggtccagactggcatctgaagatgcccaaagtgaaaatgcccaagttcagcatgcctggcttcaaaggagaaggccctgaagtcgatgttaccctccctaaagctgacattgacatttctggtcccaatgtagacgttgatgttccagacgtgaatattgaaggtccagatgcaaagctgaagggccccaagttcaagatgcctgagatgaacatcaaagcccccaagatctccatgcctgactttgacctgaacttgaagggacccaaaatgaagggtgatgtggttgtgtctttgcccaaagtggaaggtgatctaaaaggccctgaggtggacatcaagggccccaaagtggacattgacactcctgacattaacatcgaaggctcagagggtaaattcaagggacccaaatttaagataccagagatgcacctgaaggctcccaaaatatcgatgcctgacattgatttaaacctgaagggccccaaagtcaagggcgatgtggatgtttctctgcccaaaatggaaggtgacctcaagggtcctgaagttgacatcaagggccccaaagtggacattaatgctccagatgttgatgttcaaggcccagactggcacctgaagatgcccaaggtgaaaatgcccaagttcagcatgcctggcttcaaaggagagggcccagatgtggatgtgaacctgcccaaggctgaccttgatgtctcaggacccaaggtggacattgatgttccagatgtgaatatcgaaggcccagagggaaagttgaaaggtcccaaattcaagatgcctgagatgaacatcaaagcccccaagatctccatgcctgacattgatcttaacctgaaaggacccaaagtgaagggtgatatggatgtgtctctgccaaaagtggaaggtgacatgcaagttcctgacttggatattaaaggccccaaagtggatattaatgccccagatgtggatgttcgaggcccagactggcacctgaagatgcctaagataaaaatgcccaagatcagcatgcctggcttcaaaggagaaggtccagaagtggatgtgaacctgcccaaggctgaccttgacgtctcaggacccaaggtggacgttgatgttccagatgtgaatattgaaggtccagatgcgaaactgaagggccctaaattcaagatgccagagatgaacatcaaagcccccaagatctccatgcctgactttgatttgcatctgaaaggccctaaggtgaaaggagatgtggatgtttctctgcctaagatggaaggtgatctaaaggcccctgaagttgacatcaagggccccaaagtggacattgatgccccagatgtggatgttcatggcccagactggcacctgaagatgcccaaggtgaaaatgcccaaattcagcatgccaggatttaaaggagagggcccagaagtggatgttaatttgcccaaagctgacattgatgtctcaggacccaaagtggacattgacactcctgatattgatattcatggtccagaagggaaactgaagggccccaaatttaaaatgcctgacctgcacctcaaggcaccgaagatctctatgcctgaagttgacctgaatctgaaaggtccaaagatgaagggcgacgtggacgtttctctgcccaaagtggaaggcgacctcaagggccctgaagttgacatcaagggccccaaagtggacattgatgtcccagatgtggacgttcaaggcccagactggcacttaaaaatgcccaaagtgaaaatgcccaagttcagcatgcctggcttcaaaggagagggcccagatgtggatgtgaacctgcccaaggctgaccttgacgtctcaggacccaaggtggacattgatgttcctgatgtgaatatcgaaggtccagatgcgaaactaaagggccctaaattcaagatgcctgagatgaacatcaaagcccccaagatctccatgcctgactttgatttgcatctgaaaggtcccaaggtgaagggtgatgtggatgtttcccttcctaaagtggaaggtgacctcaagggcccagaagttgacatcaagggccccaaagtggacatcgatgcccctgatgtagatgttcatggcccagactggcacctgaagatgcccaaggtgaaaatgcccaaattcagcatgccaggattcaaaggagagggcccagatgtggatgttacccttcctaaggctgacattgagatttctggccccaaagtggacattgatgcccctgatgtcagtatcgaaggtccagatgcaaaactcaagggtccaaagttcaagatgccagagatgaacatcaaggcccccaaaatctccatgcctgacattgactttaacttgaagggtcccaaagtgaaaggtgatgtggatgtctctctgcccaaagtggaaggtgatctcaagggccctgaaattgacataaaaggccccagtttggacattgacacacctgatgtcaatattgaaggtccggaaggaaaattgaaggggcccaaatttaagatgcctgagatgaacatcaaagctcccaaaatctctatgcctgactttgatttgcacctgaaaggtcccaaggtgaagggtgatgtggatgtttcactacctaaggtggaaagtgatctgaaagggccagaggtagacattgaaggtcctgaagggaagctcaaaggtcccaagtttaagatgcctgatgtacatttcaaaagcccacaaatctccatgagtgacattgatttgaatttgaaaggacctaagataaaaggagatatggacatttccgttcctaaactggagggagatctgaaaggtcccaaagtggatgtcaaaggccctaaagtgggcattgacactcctgatattgacattcatggtccagaagggaaactgaagggccccaaatttaaaatgcctgacttacacctcaaggcaccgaagatctctatgcctgaagttgacctgaatctgaaaggtccaaaggtgaagggcgacatggacatttctctgcccaaagtggaaggcgacctcaagggccccgaagttgacatcagggaccccaaagtggacattgatgtcccagatgtggacgttcaaggcccagactggcacctaaaaatgcccaaagtgaaaatgcccaagttcagcatgcctggcttcaaaggagagggcccagatgtggatgtgaacctgcccaaggctgacattgatgtctcaggacccaaagtggacgttgatgttcctgatgtgaatatcgaaggtccagatgcgaaactaaagggccccaagttcaagatgcctgagatgagcatcaaagcccccaagatctccatgcctgatattgacttaaacctgaaaggacccaaagtgaagggcgatgtggatgttacccttcctaaagtggaaggtgacctcaagggcccagaagctgacatcaagggcccaaaagtggacatcaacacccctgatgtggatgttcatggcccagactggcacctgaagatgcccaaggtgaaaatgcccaaattcagcatgcctggcttcaaaggagaaggtccagatgtggatgtgagcctgcccaaggccgacatcgatgtctcgggacccaaggtggacgttgatattccagatgtgaatatcgaaggtccagacgcaaaactgaagggccccaagttcaagatgcctgaaataaatatcaaagctcccaagatctccatacctgatgttgacctggatttgaaaggacccaaagtaaaaggagattttgatgtgtctgtccctaaggttgaagggactttgaaaggcccagaagtagatcttaaaggtccacgtctggatttcgaaggccctgatgccaaactcagtggcccatctttgaagatgccatcgctggagatatctgctcctaaagtaactgctcctgatgttgatttgcatctcaaggcaccaaaaattggattttcaggtccgaagttagaaggtggtgaagtggacctcaagggacccaaagttgaagctccaagcttagatgtacacatggacagcccagatattaacatcgaagggccagatgttaaaatccccaaatttaagaaacccaagtttggatttggggcaaaaagccccaaagctgacatcaagtcaccttcactggatgtcactgttcctgaggcagagctgaaccttgagactcctgaaattagtgttggtggcaagggcaagaaaagtaagtttaaaatgcctaaaattcatatgagtggtcctaagattaaggccaaaaaacagggatttgacctgaatgttcctgggggtgaaattgatgccagcctcaaggctccggatgtagatgtcaacatcgcagggccggatgctgcactcaaagtcgacgtgaaatcgcccaaaaccaagaaaacgatgtttggaaaaatgtacttcccagatgtagagtttgacattaaatcacctaaatttaaagctgaggcccctctccctagccccaaactggagggtgaactccaggcacctgatctggaactttctttgccagcgattcacgtcgaaggtcttgacatcaaggcgaaggctcccaaggtcaagatgccagatgtggacatctcagtgccaaaaatagagggtgacctgaaaggccccaaagtgcaggcaaacttgggtgcacctgacatcaacatcgaaggcctagatgctaaagtcaaaacaccgtccttcggcatttctgcccctcaagtctccatccctgatgtgaatgtaaacttgaaaggaccaaagataaagggtgatgtccccagcgtgggactggaaggaccagatgtagatctgcaaggtccagaagcaaaaattaagttccccaagttttccatgcccaagatcggcatcccaggtgtgaaaatggagggtgggggagccgaggtccatgcccagctaccctctcttgaaggagacttgagaggaccagatgttaagctcgaagggcccgatgtttctctaaaggggccaggagtagacttgccttcagtgaacctctctatgccaaaagtctctgggcctgaccttgatctgaacttgaaaggaccaagtttgaagggagacctggatgcatctgttcccagcatgaaggtgcatgctccagggctcaacctcagtggtgtcggtggcaaaatgcaggtgggaggagacggtgtgaaagtgccagggatcgatgccacaacaaagcttaacgttggggcaccagatgtgacactgaggggaccaagcctgcagggagatctggctgtctctggtgacatcaaatgccctaaagtatccgtaggagctcctgatctaagcttggaggcatccgaaggcagcattaaacttcccaaaatgaagctgccccaatttggcatctctactccggggtccgacttgcacgtcaatgccaaggggccacaggtttctggcgaactgaaggggccaggtgtggatgtgaacctgaaagggcctcggatttcagcaccgaatgtggactttaacttggaaggaccaaaagtgaaagggagccttggggccactggtgagatcaaaggccccactgtcggaggaggtcttccaggcattggtgttcaaggcctagaaggaaacctccagatgcctggaattaagtcctctggatgtgatgtgaacctgccaggcgtgaatgtgaaactcccaactgggcagatttctgggcctgaaatcaaaggtggtctgaaaggttcagaagtaggtttccatggggctgctcctgatatcagtgtgaaggggcctgcctttaatatggcatctcctgagtcagattttggcatcaacttgaagggcccaaaaatcaaaggaggtgcggatgtttcagggggtgtcagtgccccagacatcagccttggtgaagggcatttgagtgttaaaggttccgggggtgagtggaagggaccccaagtctcctctgctctcaacttggacacatctaagtttgctgggggccttcatttctcaggaccaaaggtggaaggaggtgtgaaaggaggtcagattggactccaggctcctgggctgagtgtgtctgggcctcaaggtcacttggaaagtggatctggaaaagtaacattccctaaaatgaagatccccaaatttaccttctctggccgtgagctggttggcagagaaatgggggtggatgttcacttccctaaagcagaggccagcatccaagctggtgctggagacggcgagtgggaagagtctgaagtcaaactgaaaaagtccaagatcaaaatgcccaagtttaatttttccaaacctaaagggaaaggtggtgtcactggctcaccagaagcatcaatttctgggtccaaaggtgacctgaaaagttcaaaggccagcctgggctctctggaaggagaggcagaggccgaagcctcttcaccgaaaggcaaattctccttatttaaaagtaagaagccacggcaccgctcaaattcattcagtgatgaaagagagttctctggaccttccaccccgacggggacgctggagtttgaaggtggggaagtgtctctggaaggtgggaaagttaaagggaaacacgggaagctgaaattcggtacctttggtggattggggtcaaagagcaaaggtcattatgaggtgactgggagcgatgatgagacaggcaagttacaggggagtggggtgtccctggcctctaagaagtcccgactgtcctcctcttctagcaatgacagtgggaataaggttggcatccagcttcccgaggtggagctgtcagtttccacaaagaaagagtagcaggcctttgtatgtgtgtacatatatatatatataacaaaacatcagccttgggtggtgtgttcctatataaactccaaagggaaacacaccgactgcctcagcaatcatgcaaagaccttgcctggcccggtggcaagcgctgaaaaaccgaccgcctgtaggctcctggaactatacagataggtaaagagttccaagttcgtccagcccatgtgcaaagtcaacagtatttgccttaagatttcatatatatatatttttttgcattgactgctgagagctcctgtttactaagcaagcttttgtgtttattatcctcatttttactgaacattgttagttttggggtaatggaaacccactttttcattgtaatgactttgggggcttttgttagtaagggtgggtggggtgatgggttgcagacggaggtcaggtcttcctctttcctgagactggatctgttcaaacagcaaacgcccacagatggcccagaggtggtggtagtcagggtgtgtgggtgtttttagggttctttagtgttgtttctttcacccaggggtggtggtcccagccagtttggtgctgacggtgagaggaaattagaatctgtttgcaaattgtccaacccaccccctcaacatgaggggcttccattttctgtgttttgtaagggaactgtttccttcatgccgccatgttcctgatattagttctgatttctttttaacaaatgttatcatgattaagaaaatttccagcactttaatggccaattaactgagaatgtaagaaaattgatgctgtacaaggcaaataaagctgtttattaaccttga

SEQ ID NO: 421 - DNA, 308 bp, Homo sapiens
  modified_base (152)..(152): a, c, t or g
  modified_base (266)..(266): a, c, t or g
atttattttttaaagagatgggatctccctctgtcatccaggctggtctccaactcctggcctccagtgatcctcctgcttcagcctcctgagtagctgtgattacaggtacaagccatggcacctgtctgggcagggggcccagggccacnattttgacccctagggctaggcctgagctcttccaaggggttccgaggctgactgatccccaccaatctttgtgatgtctctgcctggtgcctggctttcggcctggggctggntgaatcaacgagggggcgttgaatattgagcggtgggtttct

SEQ ID NO: 422 - DNA, 456 bp, Homo sapiens
  modified_base (71)..(71): a, c, t or g
  modified_base (349)..(349): a, c, t or g
  modified_base (367)..(367): a, c, t or g
  modified_base (426)..(426): a, c, t or g
  modified_base (438)..(438): a, c, t or g
  modified_base (446)..(446): a, c, t or g
  modified_base (453)..(453): a, c, t or g
tgggaaagtagctccagcagcacccgagagtcatggagaaaagcggaggaagctgggtaggccctgagggntctcggtaagccatcatgaccacccggcaagccacgaaggatcccctcctccggggtgtatctcctacccctagcaagattccggtacgctctcagaaacgcacgcctttccccactgttacatcgtgcgccgtggaccaggagaaccaagatccacggagatgggtgcagaaaccaccgctcaatattcaacgccccctcgttgattcagcaggccccaggcatatagccaggcaccaggcagagacatcacaaagattggtggggatcagtcagcnttcggaacccctttgggnagagcttcagggcttagcccttaagggggttcaaaaatgttgggggccttgggcccttngtccccaggaanaggttggncattggnttt

SEQ ID NO: 423 - DNA, 2561 bp, Homo sapiens
cgccaggaacagcttgaggtacctgagccctgccctccagcagcacccgagagggtcaggagaaaagcggaggaagctgggtaggccctgaggggcctcggtaagccatcatgaccacccggcaagccacgaaggatcccctcctccggggtgtatctcctacccctagcaagattccggtacgctctcagaaacgcacgcctttccccactgttacatcgtgcgccgtggaccaggagaaccaagatccaaggagatgggtgcagaaaccaccgctcaatattcaacgccccctcgttgattcagcaggccccaggccgaaagccaggcaccaggcagagacatcacaaagattggtggggatcagtcagcctcggaaccccttggaagagctcaggcctagccctaggggtcaaaatgtggggcctgggccccctgcccagacagaggctccagggaccatagagtttgtggctgaccctgcagccctggccaccatcctgtcaggtgagggtgtgaagagctgtcacctggggcgccagcctagtctggctaaaagagtactggttcgaggaagtcagggaggcaccacccagagggtccagggtgttcgggcctctgcatatttggcccccagaacccccacccaccgactggaccctgccagggcttcctgcttctctaggctggagggaccaggacctcgaggccggacattgtgcccccagaggctacaggctctgatttcaccttcaggaccttcctttcacccttccactcaccccagtttccaggagctaagaagggagacagctggcagcagccggacttcagtgagccaggcctcaggattgctcctggagaccccagtccagcctgctttctctcttcctaaaggagaacgcgaggttgtcactcactcagatgaaggaggtgtggcctctcttggtctggcccagcgagtaccattaagagaaaaccgagaaatgtcacataccagggacagccatgactcccacctgatgccctcccctgcccctgtggcccagcccttgcctggccatgtggtgccatgtccatcaccctttggacgggctcagcgtgtaccctccccaggccctccaactctgacctcatattcagtgttgcggcgtctcaccgttcaacctaaaacccggttcacacccatgccatcaacccccagagttcagcaggcccagtggctgcgtggtgtctcccctcagtcctgctctgaagatcctgccctgccctgggagcaggttgccgtccggttgtttgaccaggagagttgtataaggtcactggagggttctgggaaaccaccggtggccactccttctggaccccactctaacagaacccccagcctccaggaggtgaagattcaacgcatcggtatcctgcaacagctgttgagacaggaagtagaggggctggtagggggccagtgtgtccctcttaatggaggctcttctctggatatggttgaacttcagcccctgctgactgagatttctagaactctgaatgccacagagcataactctgggacttcccaccttcctggactgttaaaacactcagggctgccaaagccctgtcttccagaggagtgcggggaaccacagccctgccctccggcagagcctgggcccccagaggccttctgtaggagtgagcctgagataccagagccctccctccaggaacagcttgaagtaccagagccctaccctccagcagaacccaggcccctagagtcctgctgtaggagtgagcctgagataccggagtcctctcgccaggaacagcttgaggtacctgagccctgccctccagcagaacccaggcccctagagtcctactgtaggattgagcctgagataccggagtcctctcgccaggaacagcttgaggtacctgagccctgccctccagcagaacccgggccccttcagcccagcacccaggggcagtctggacccccagggccctgccctagggtagagctgggggcatcagagccctgcaccctggaacatagaagtctagagtccagtctaccaccctgctgcagtcagtgggctccagcaaccaccagcctgatcttctcttcccaacacccgctttgtgccagcccccctatctgctcactccagtctttgagacccccagcaggccaggcaggcctcagcaatctggcccctcgaaccctagccctgagggagcgcctcaaatcgtgtttaaccgccatccactgcttccacgaggctcgtctggacgatgagtgtgccttttacaccagccgagcccctccctcaggccccacccgggtctgcaccaaccctgtggctacattactcgaatggcaggatgccctgtgtttcattccagttggttctgctgccccccagggctctccatgatgagacaaccactcctgccctgccgtacttcttccttttagcccttatttattgtcggtctgcccatgggactgggagccgcccacttttgtcctcaataaagtttctaaagta

SEQ ID NO: 424 - DNA, 273 bp, Homo sapiens
  modified_base (248)..(248): a, c, t or g
ttttaaaatcaataataatttttattttttgttcagcacacatggcaacacagagctgtgaagacagacgtggttagcacaaaccacttgggccagtgaaaccagggcaaactcatggatcatctgcgttcccatcttcaccttggtggcagccctacctctgagattttaaggtctacggaaagtgcaggcttcccaggagtgctgtggagcagagcagagaggtaggattttcaaaatcttcctanaatttattttctgaactgtcgagtg

SEQ ID NO: 425 - DNA, 410 bp, Homo sapiens
  modified_base (361)..(361): a, c, t or g
gaacaccagtttctgagaactgaaatagaataaaacacatctttgcagtataactatgttgggtgtaactgagtcacctgaaaaagtttggaagctggggaataacatgtggtgtagggcagttagtctttccacaggagtatgcagataagggagtcttgatccttattaaaatgctgattctcagagccttgagatactgatttagaaagtctgtgctaggtcaggtatccgcatttgaaaagctgcccccatgtaattctgacggaagcagcaatgtgcttgtctaggttcgctattgtgagaatcaagttgatatttacctaaccctatatcctccacaaaagcagacaagtctggntctgggtcttctttccccccatcccttaagcccacagcacagaaactgg

SEQ ID NO: 426 - DNA, 2318 bp, Homo sapiens
gcacagaagcgagtccgactgtgctcgctgctcagcgccgcacccggaagatgaggctcgccgtgggagccctgctggtctgcgccgtcctggggctgtgtctggctgtccctgataaaactgtgagatggtgtgcagtgtcggagcatgaggccactaagtgccagagtttccgcgaccatatgaaaagcgtcattccatccgatggtcccagtgttgcttgtgtgaagaaagcctcctaccttgattgcatcagggccattgcggcaaacgaagcggatgctgtgacactggatgcaggtttggtgtatgatgcttacctggctcccaataacctgaagcctgtggtggcagagttctatgggtcaaaagaggatccacagactttctattatgctgttgctgtggtgaagaaggatagtggcttccagatgaaccagcttcgaggcaagaagtcctgccacacgggtctaggcaggtccgctgggtggaacatccccataggcttactttactgtgacttacctgagccacgtaaacctcttgagaaagcagtggccaatttcttctcgggcagctgtgccccttgtgcggatgggacggacttcccccagctgtgtcaactgtgtccagggtgtggctgctccacccttaaccaatacttcggctactcgggagccttcaagtgtctgaaggatggtgctggggatgtggcctttgtcaagcactcgactatatttgagaacttggcaaacaaggctgacagggaccagtatgagctgctttgcctggacaacacccggaagccggtagatgaatacaaggactgccacttggcccaggtcccttctcataccgtcgtggcccgaagtatgggcggcaaggaggacttgatctgggagcttctcaaccaggcccaggaacattttggcaaagacaaatcaaaagaattccaactattcagctctcctcatgggaaggacctgctgtttaaggactctgcccacgggtttttaaaagtcccccccaggatggatgccaagatgtacctgggctatgagtatgtcactgccatccggaatctacgggaaggcacatgcccagaagccccaacagatgaatgcaagcctgtgaagtggtgtgcgctgagccaccacgagaggctcaagtgtgatgagtggagtgttaacagtgtagggaaaatagagtgtgtatcagcagagaccaccgaagactgcatcgccaagatcatgaatggagaagctgatgccatgagcttggatggagggtttgtctacatagcgggcaagtgtggtctggtgcctgtcttggcagaaaactacaataagagcgataattgtgaggatacaccagaggcagggtattttgctgtagcagtggtgaagaaatcagcttctgacctcacctgggacaatctgaaaggcaagaagtcctgccatacggcagttggcagaaccgctggctggaacatccccatgggcctgctctacaataagatcaaccactgcagatttgatgaatttttcagtgaaggttgtgcccctgggtctaagaaagactccagtctctgtaagctgtgtatgggctcaggcctaaacctgtgtgaacccaacaacaaagagggatactacggctacacaggcgctttcaggtgtctggttgagaagggagatgtggcctttgtgaaacaccagactgtcccacagaacactgggggaaaaaaccctgatccatgggctaagaatctgaatgaaaaagactatgagttgctgtgccttgatggtaccaggaaacctgtggaggagtatgcgaactgccacctggccagagccccgaatcacgctgtggtcacacggaaagataaggaagcttgcgtccacaagatattacgtcaacagcagcacctatttggaagcaacgtaactgactgctcgggcaacttttgtttgttccggtcggaaaccaaggaccttctgttcagagatgacacagtatgtttggccaaacttcatgacagaaacacatatgaaaaatacttaggagaagaatatgtcaaggctgttggtaacctgagaaaatgctccacctcatcactcctggaagcctgcactttccgtagaccttaaaatctcagaggtagggctgccaccaaggtgaagatgggaacgcagatgatccatgagtttgccctggtttcactggcccaagtggtttgtgctaaccacgtctgtcttcacagctctgtgttgccatgtgtgctgaacaaaaaataaaaattattattgattttatatttc

SEQ ID NO: 427 - DNA, 432 bp, Homo sapiens
  modified_base (303)..(303): a, c, t or g
  modified_base (306)..(306): a, c, t or g
  modified_base (311)..(311): a, c, t or g
  modified_base (415)..(415): a, c, t or g
aggtaaaataagggcacatctttattttgctacaaggcagtaagtacaccgtcatatctcaaaagttcagtgctggccatcttgcatcaaatgttcttaaggcagtgactggctatcaaccacagtttctgtctccccagttgcaaacacaggatccatgcaacagttctgagaccatacacttagaaaccacaggggatgcggatcaaatgcagaactcccaaattataaaacagtcaggctacactcaaaacaaaacatagaacatcaacaacacacatctcccaaaaaagaagtgcaacnatngcttngtataaaccaacaataacaaaaaaaccacaataaaaaatgcagagtctcccaaacaagttttcaaatgtattgcagaaggaaaaaaaatgtatatatatataanattaaaaagtctgaaag

SEQ ID NO: 428 - DNA, 242 bp, Homo sapiens
  modified_base (231)..(231): a, c, t or g
agaaccccagctatcaaaaggtcaatcttagaaagctctccaagaactcctacaccattcaaacatgcacttgcagctcaagaaattaaatacggtcccctgaagatgctacctcagacaccctctcatctagtagaagatctgcaggatgtgatcaaacaggaatctgatgaatctggaattgttgctgagtttcaacgaaaatggaccacccttactgaacgaaaatcntacaacgaggt

SEQ ID NO: 429 - DNA, 3342 bp, Homo sapiens
aatatcaacctgtttcctcctcctccttctcctcctcctccgtgacctcctcctcctctttctcctgagaaacttcgccccagcggtgcggagcgccgctgcgcagccggggagggacgcaggcaggcggcgggcagcgggaggcggcagcccggtgcggtccccgcggctctcggcggagccccgcgcccgccgcgccatggcccgaagaccccggcacagcatatatagcagtgacgaggatgatgaggactttgagatgtgtgaccatgactatgatgggctgcttcccaagtctggaaagcgtcacttggggaaaacaaggtggacccgggaagaggatgaaaaactgaagaagctggtggaacagaatggaacagatgactggaaagttattgccaattatctcccgaatcgaacagatgtgcagtgccagcaccgatggcagaaagtactaaaccctgagctcatcaagggtccttggaccaaagaagaagatcagagagtgatagagcttgtacagaaatacggtccgaaacgttggtctgttattgccaagcacttaaaggggagaattggaaaacaatgtagggagaggtggcataaccacttgaatccagaagttaagaaaacctcctggacagaagaggaagacagaattatttaccaggcacacaagagactggggaacagatgggcagaaatcgcaaagctactgcctggacgaactgataatgctatcaagaaccactggaattctacaatgcgtcggaaggtcgaacaggaaggttatctgcaggagtcttcaaaagccagccagccagcagtggccacaagcttccagaagaacagtcatttgatgggttttgctcaggctccgcctacagctcaactccctgccactggccagcccactgttaacaacgactattcctattaccacatttctgaagcacaaaatgtctccagtcatgttccataccctgtagcgttacatgtaaatatagtcaatgtccctcagccagctgccgcagccattcagagacactataatgatgaagaccctgagaaggaaaagcgaataaaggaattagaattgctcctaatgtcaaccgagaatgagctaaaaggacagcaggtgctaccaacacagaaccacacatgcagctaccccgggtggcacagcaccaccattgccgaccacaccagacctcatggagacagtgcacctgtttcctgtttgggagaacaccactccactccatctctgccagcggatcctggctccctacctgaagaaagcgcctcgccagcaaggtgcatgatcgtccaccagggcaccattctggataatgttaagaacctcttagaatttgcagaaacactccaatttatagattctttcttaaacacttccagtaaccatgaaaactcagacttggaaatgccttctttaacttccacccccctcattggtcacaaattgactgttacaacaccatttcatagagaccagactgtgaaaactcaaaaggaaaatactgtttttagaaccccagctatcaaaaggtcaatcttagaaagctctccaagaactcctacaccattcaaacatgcacttgcagctcaagaaattaaatacggtcccctgaagatgctacctcagacaccctctcatctagtagaagatctgcaggatgtgatcaaacaggaatctgatgaatctggaattgttgctgagtttcaagaaaatggaccacccttactgaagaaaatcaaacaagaggtggaatctccaactgataaatcaggaaacttcttctgctcacaccactgggaaggggacagtctgaatacccaactgttcacgcagacctcgcctgtggcagatgcaccgaatattcttacaagctccgttttaatggcaccagcatcagaagatgaagacaatgttctcaaagcatttacagtacctaaaaacaggtccctggcgagccccttgcagccttgtagcagtacctgggaacctgcatcctgtggaaagatggaggagcagatgacatcttccagtcaagctcgtaaatacgtgaatgcattctcagcccggacgctggtcatgtgagacatttccagaaaagcattatggttttcagaacacttcaagttgacttgggatatatcattcctcaacatgaaacttttcatgaatgggagaagaacctatttttgttgtggtacaacagttgagagcagcaccaagtgcatttagttgaatgaagtcttcttggatttcacccaactaaaaggatttttaaaaataaataacagtcttacctaaattattaggtaatgaattgtagccagttgttaatatcttaatgcagatttttttaaaaaaaacataaaatgatttatctgtattttaaaggatccaacagatcagtattttttcctgtgatgggttttttgaaatttgacacattaaaaggtactccagtatttcacttttctcgatcactaaacatatgcatatatttttaaaaatcagtaaaagcattactctaagtgtagacttaataccatgtgacatttaatccagattgtaaatgctcatttatggttaatgacattgaaggtacatttattgtaccaaaccattttatgagttttctgttagcttgctttaaaaattattactgtaagaaatagttttataaaaaattatatttttattcagtaatttaattttgtaaatgccaaatgaaaaacgttttttgctgctatggtcttagcctgtagacatgctgctagtatcagaggggcagtagagcttggacagaaagaaaagaaacttggtgttaggtaattgactatgcactagtatttcagactttttaattttatatatatatacattttttttccttctgcaatacatttgaaaacttgtttgggagactctgcattttttattgtggtttttttgttattgttggtttatacaagcatgcgttgcacttcttttttgggagatgtgtgttgttgatgttctatgttttgttttgagtgtagcctgactgttttataatttgggagttctgcatttgatccgcatcccctgtggtttctaagtgtatggtctcagaactgttgcatggatcctgtgtttgcaactggggagacagaaactgtggttgatagccagtcactgccttaagaacatttgatgcaagatggccagcactgaacttttgagatatgacggtgtacttactgccttgtagcaaaataaagatgtgcccttattttacctaaaaaaaaaaaaaaaaaaaaaaaaaaaaa

SEQ ID NO: 430 - DNA, 338 bp, Homo sapiens
  modified_base (279)..(279): a, c, t or g
  modified_base (335)..(335): a, c, t or g
tgcctttcgacacgtcttgtaattttttgctaaatgctggatatgatatactgggtaaaagaaagaaataaatatgcctttggtgtgaagttttatgtagacctggcaaggcataagactatgtttaatgtttgtgtacaaaccataggtgtcagaggttataattttctctatctttgtttttcacatccttgctgtcttcaggtttccctaagggactcctaaacaatctgagccttacagttattttagttgtgattccctggttattatttatgnagccatggttggatgtggcaggtaagggtggtggggacaggggagggaatcattcnttc

SEQ ID NO: 431 - DNA, 444 bp, Homo sapiens
  modified_base (1)..(1): a, c, t or g
  modified_base (271)..(271): a, c, t or g
  modified_base (276)..(276): a, c, t or g
  modified_base (371)..(371): a, c, t or g
  modified_base (402)..(402): a, c, t or g
  modified_base (410)..(410): a, c, t or g
nctattgatacttttatgtttaccactgtattactaaatataataatttatattaaaggcagtggctgttgaactattttaatgttgtcattttacttgtgagataaactttatactttatcccacttagttagcacctaccagaagacaccaaaatggtttatttcaaaattactttttaaaaattattacttatgagtttttcttttatggaatttttgaaagatgatcagagctttccagtctttttagcagagatttgcccccaggnaaatntggttttaccagcatctaaccaatatgggttttatcagagtttaaccaaagtagggagaatggaaataccccatttaggacccctcctgctttcntggtcttcacctaagggaggggttggaccgnagaagcancgaagatcgcagccaaggaggcacagaccacttt

SEQ ID NO: 432 - DNA, 3963 bp, Homo sapiens
cctgcgtgtccctctgcgctccgactggtgcgacttctccctgcgctagcgaggcagggttttggcctcgcctctcgcgagatcgcctcctgttgctgccgccgccgctcctggccactgactggcggcgcctgcgcagccgccatgttcggttgctatgctgcggcctaggagagggggtgtgcttgagggaggaggaagagatagaggaggaggagggggaggaagaggaggtggagaaggaggggggtgactgagctcctcttgcactctcacacacaaacgctgcccaggattacccgccagctcacgccgcgcagtgcgcttttccgctcctcgcgccccaccaccaacattgttctctcaggactcctgggtcccaggggtcggaattgggcctgagcgggagaggaaagagacttggctttggccgcggggtcggaggattggggccaggccccctcccccacgcacttttgggggtgtggattatctcatccctgcagggaggtaggagaggtcgccggctgcccgcctccctgccacctccccagcggcgccggcccgcggctgcccagcagcatgaggtggtgctggcggctccgggtcgtggcgcgaccgctgcggcggcggctgctcggggggcgctgaggtagccccccggagcggcacggaggacgcgcttctcctctgcgcgccggggcctcgaggctttttttctccagccgagaggacgcggctgtgatatacgaagactttgtgtggacagtaatgacctcacgtttccgattgcctgctggcagaacctacaatgtacgagcatcagagttggcccgagacagacagcatactgaagtggtttgcaacatccttcttctggataacactgtacaagctttcaaagtcaataaacatgatcaggggcaagtcttgttggatgtcgtcttcaagcatctagatttgactgagcaggactattttggtttacagttggctgatgattccacagataacccaaggtggctggatccaaacaaaccaataaggaagcagctaaagagaggatctccttacagtttgaactttagagtcaaattttttgtaagtgaccccaacaagttacaagaagaatatacaaggtaccagtattttttgcaaattaaacaagacattcttactggaagattaccctgtccttctaatactgctgcccttttagcttcatttgctgttcagtctgaacttggagactacgatcagtcagagaacttgtcaggctacctctcagattattctttcattcctaatcaacctcaagattttgaaaaagaaattgcaaaattacatcagcaacacataggcttatctcctgcagaagcagaatttaattacctaaacacagcacgtaccttagaactctatggagttgaattccactatgcaagggatcagagtaacaatgaaattatgattggagtgatgtcaggaggaattctgatttataagaacagggtacgaatgaatacctttccatggttgaagattgtaaaaatttcttttaagtgcaaacagttttttattcaacttagaaaagaattgcatgaatctagagaaacattattgggatttaatatggtgaattacagagcatgtaaaaatttgtggaaagcatgtgtagaacatcacacattcttccgtttggacagaccacttccacctcaaaagaatttttttgcacattattttacattaggttcaaaattccggtactgtgggagaactgaagtccaatcagttcagtatggcaaagaaaaggcaaataaagacagggtatttgcaagatccccaagtaagcccttggcacggaaattaatggattgggaagtagtaagcagaaattcaatatctgatgacaggttagaaacacaaagtcttccatcacgatctccaccgggaactcctaatcatcgaaattctacattcacgcaggaaggaacccggttacgaccatcttcagttggtcatttggtagaccatatggttcatacttccccaagcgaagtgtttgtaaatcagagatctccgtcatcaacacaagctaatagcattgttctggaatcatcaccatcacaagagacccctggagatgggaagcctccagctttaccacccaaacagtcaaagaaaaacagttggaaccaaattcattattcacattcgcaacaagatctagaaagtcatattaatgaaacatttgatattccatcttctcctgaaaaacccactcctaatggtggtattccacatgataatcttgtcctaatcagaatgaaacctgatgaaaatgggaggtttggattcaatgtaaagggaggatatgatcagaagatgcctgtgattgtgtctcgagtagcaccaggaacacctgctgacctctgtgtccctagactgaatgaaggggaccaagttgtactgatcaatggtcgggacattgcagaacacactcatgatcaggttgtgctgtttattaaagctagttgtgagagacattctggggaactcatgcttctagttcgacctaatgctgtatatgatgtagtggaagaaaagctagaaaatgagccagatttccagtatattcctgagaaagccccactagatagtgtgcatcaggatgaccattccctgcgggagtcaatgatccagctagctgaggggcttatcactggaacagtcctgacacagtttgatcaactgtatcggaaaaaacctggaatgacaatgtcctgtgccaaattacctcagaatatttccaaaaatagatacagagatatttcgccttatgatgccacacgggtcattttaaaaggtaatgaagactacatcaatgcgaactatataaatatggaaattccttcttccagcattataaatcagtacattgcttgtcaagggccattaccacacacttgtacagatttttggcagatgacttgggaacaaggctcctctatggttgtaatgttgaccacacaagttgaacgtggcagagttaaatgtcaccaatattggccagaacccacaggcagttcatcttatggatgctaccaagttacctgccactctgaagaaggaaacactgcctatatcttcaggaagatgaccctatttaaccaagagaaaaatgaaagtcgtccactcactcagatccagtacatagcctggcctgaccatggagtccctgatgattcgagtgactttctagattttgtttgtcatgtacgaaacaagagggctggcaaggaagaacccgttgttgtccattgcagtgctggaatcggaagaactggggttcttattactatggaaacagccatgtgtctcattgaatgcaatcagccagtttatccactagatattgtaagaacaatgagagatcagcgagccatgatgatccaaacacctagtcaatacagatttgtatgtgaagctattttgaaagtttatgaagaaggctttgttaaacccttaacaacatcaacaaataaataagaaagcaaaaagatctgggatatgtgttggaaaactgctttcccttatgttcactgtgccataatgctgctcgcaggaaatggcattttacaaaaaaaaaatgaagaactcaaaaaaactttgaaaacttcagcactgttgcactttatgttttaaaaaatgtcactctttcaaaatctataactcatgtatttgaagactgtttcatgctttgctccgaacaaatagtaaataactgagtatgttcagggtaatttatgaaattttgtggtggtgccatgcaatccccttttggtagaattgccacaaacaaggctcaaaattctcatcatctctgttatacacctgtatcatgaaagcaaaaagaagtaaacatcaggagtcagctctgaaaaaaaaaaaaaaaaaaaa

SEQ ID NO: 433 - DNA, 272 bp, Homo sapiens
  modified_base (107)..(107): a, c, t or g
  modified_base (137)..(137): a, c, t or g
  modified_base (140)..(140): a, c, t or g
  modified_base (173)..(173): a, c, t or g
  modified_base (205)..(205): a, c, t or g
  modified_base (214)..(214): a, c, t or g
  modified_base (235)..(235): a, c, t or g
  modified_base (263)..(263): a, c, t or g
ctgagtcagtcttgcttgtttatctggctactaacacattccaagtaagattctaagtaaaattaaagtgtctgtatttcccagcagcatgcatcattttttaagangataccttttaatctacacaataaattgangantagcatgcactggtcctgggagttagtagtgantaaagcgccaccgtctcagaactagagcaganttcaaagangccagtgccaatatggcaggntgaacatgtagaacctgagccagggcancacatgggc

SEQ ID NO: 434 - DNA, 417 bp, Homo sapiens
  modified_base (359)..(359): a, c, t or g
gctttgtttcttctctccctcgcttccttctcttcttccttgcttctatttggtgccaaacaccgcgttttatttatgatattaaaaagtaaagtgagtgtgatggtggctggtcacccattgttttgaattaataacagaaaaaaagaaatattttagtggcccatatgtttatttttatgtgtttatgtatgtggttttggggttttttagtgccttctatccctagaagtcactttaatctcaagactgtccaaataaacttttcagcaaaagcatcaggtgagaagtctgggagaaaccatcctataaaacaatatgaacagaatgggagcagtggaacacaatggctcccattnctttctctggtcctccaagccatctttcttcttataggactccctgccatgtgttgcc

SEQ ID NO: 435 - DNA, 3186 bp, Homo sapiens
gcggccgcggcggtgcagcagaggcgcctcgggcaggaggagggcggcttctgcgagggcagcctgaggtattaaaaagtgtcagcaaactgcattgaataacagacatcctaagaggggatattttccacctctataatgaagaaaagcaggagtgtgatgacggtgatggctgatgataatgttaaagattattttgaatgtagcttgagtaaatcctacagttcttccagtaacacacttgggatcgacctctggagagggagaaggtgttgctcaggaaacttacagttaccaccactgtctcaaagacagagtgaaagggcaaggactcctgagggagatggtatttccaggccgaccacactgcctttgacaacgcttccaagcattgctattacaactgtaagccaggagtgctttgatgtggaaaatggcccttccccaggtcggagtccactggatccccaggccagctcttccgctgggctggtacttcacgccacctttcctgggcacagccagcgcagagagtcatttctctacagatcagacagcgactatgacttgtcaccaaaggcgatgtcgagaaactcttctcttccaagcgagcaacacggcgatgacttgattgtaactccttttgcccaggtccttgccagcttgcgaagtgtgagaaacaacttcactatactgacaaaccttcatggtacatctaacaagaggtccccagctgctagtcagcctcctgtctccagagtcaacccacaagaagaatcttatcaaaaattagcaatggaaacgctggaggaattagactggtgtttagaccagctagagaccatacagacctaccggtctgtcagtgagatggcttctaacaagttcaaaagaatgctgaaccgggagctgacacacctctcagagatgagccgatcagggaaccaggtgtctgaatacatttcaaatactttcttagacaagcagaatgatgtggagatcccatctcctacccagaaagacagggagaaaaagaaaaagcagcagctcatgacccagataagtggagtgaagaaattaatgcatagttcaagcctaaacaatacaagcatctcacgctttggagtcaacactgaaaatgaagatcacctggccaaggagctggaagacctgaacaaatggggtcttaacatctttaatgtggctggatattctcacaatagacccctaacatgcatcatgtatgctatattccaggaaagagacctcctaaagacattcagaatctcatctgacacatttataacctacatgatgactttagaagaccattaccattctgacgtggcatatcacaacagcctgcacgctgctgatgtagcccagtcgacccatgttctcctttctacaccagcattagacgctgtcttcacagatttggagatcctggctgccatttttgcagctgccatccatgacgttgatcatcctggagtctccaatcagtttctcatcaacacaaattcagaacttgctttgatgtataatgatgaatctgtgttggaaaatcatcaccttgctgtgggtttcaaactgctgcaagaagaacactgtgacatcttcatgaatctcaccaagaagcagcgtcagacactcaggaagatggttattgacatggtgttagcaactgatatgtctaaacatatgagcctgctggcagacctgaagacaatggtagaaacgaagaaagttacaagttcaggcgttcttctcctagacaactataccgatcgcattcaggtccttcgcaacatggtacactgtgcagacctgagcaaccccaccaagtccttggaattgtatcggcaatggacagaccgcatcatggaggaatttttccagcagggagacaaagagcgggagaggggaatggaaattagcccaatgtgtgataaacacacagcttctgtggaaaaatcccaggttggtttcatcgactacattgtccatccattgtgggagacatgggcagatttggtacagcctgatgctcaggacattctcgataccttagaagataacaggaactggtatcagagcatgatacctcaaagtccctcaccaccactggacgagcagaacagggactgccagggtctgatggagaagtttcagtttgaactgactctcgatgaggaagattctgaaggacctgagaaggagggagagggacacagctatttcagcagcacaaagacgctttgtgtgattgatccagaaaacagagattccctgggagagactgacatagacattgcaacagaagacaagtcccccgtggatacataatccccctctccctgtggagatgaacattctatccttgatgagcatgccagctatgtggtagggccagcccaccatgggggccaagacctgcacaggacaagggccacctggcctttcagttacttgagtttggagtcagaaagcaagaccaggaagcaaatagcagctcaggaaatcccacggttgacttgccttgatggcaagcttggtggagagggctgaagctgttgctgggggccgattctgatcaagacacatggcttgaaaatggaagacacaaaactgagagatcattctgcactaagtttcgggaacttatccccgacagtgactgaactcactgactaataacttcatttatgaatcttctcacttgtccctttgtctgccaacctgtgtgccttttttgtaaaacattttcatgtctttaaaatgcctgttgaatacctggagtttagtatcaacttctacacagataagctttcaaagttgacaaacttttttgactctttctggaaaagggaaagaaaatagtcttccttctttcttgggcaatatccttcactttactacagttacttttgcaaacagacagaaaggatacacttctaaccacattttacttccttcccctgttgtccagtccaactccacagtcactcttaaaacttctctctgtttgcctgcctccaacagtacttttaactttttgctgtaaacagaataaaattgaacaaattagggggtagaaaggagcagtggtgtcgttcaccgtgagagtctgcatagaactcagcagtgtgccctgctgtgtcttggaccctgcaatgcggccgc

SEQ ID NO: 436 - DNA, 313 bp, Homo sapiens
cggcccaactggcatcctcacaggtcgatatcccgcacgtctgtaggggtgctggcttggtccagttcatcctccgacttggatccgtcacgttggtcctgacggtactgctgcaggctattgaggagcaccgcctcaatctgctcctggcaagctttgagacaatccacgtctgtgttggtgatcttagccagcagctcagtcagggcatcacaagtgagcgagctcactttcctcatcctgctggagcccacagatgggctgctcccacactttccagttgcgattcatcgacggtggggtacatgggcaa

SEQ ID NO: 437 - DNA, 368 bp, Homo sapiens
  modified_base (5)..(5): a, c, t or g
  modified_base (306)..(306): a, c, t or g
  modified_base (314)..(314): a, c, t or g
  modified_base (323)..(323): a, c, t or g
  modified_base (333)..(333): a, c, t or g
  modified_base (345)..(345): a, c, t or g
  modified_base (364)..(364): a, c, t or g
ctcgnccaccacccaatcctcgcctctcttctgctccaccttctctctctgccctcacctctcccccgaaaaccccctatttagccaaaggaaggaggtcaggggaacgctctcccctccccttccaaaaaacaaaaacagaaaaacccttttccaggccggggaaagcaggagggagaggggccgccgggctggccatggagctgctgtgccacgaggtggacccggtccgcaggccttgcgggtaccgcaacctgctccgagacgaccgcgtcctgcagaacctgcttcaccatcgaggagcgnttaccttnccgcagtgnttcctaattncaagttgcgtgnagaaggacatccaaacctnacat

SEQ ID NO: 438 - DNA, 6480 bp, Homo sapiens
agagcgagcaggggagagcgagaccagttttaaggggaggaccggtgcgagtgaggcagccccgaggctctgctcgcccaccacccaatcctcgcctcccttctgctccaccttctctctctgccctcacctctcccccgaaaaccccctatttagccaaaggaaggaggtcaggggaacgctctcccctccccttccaaaaaacaaaaacagaaaaacccttttccaggccggggaaagcaggagggagaggggccgccgggctggccatggagctgctgtgccacgaggtggacccggtccgcagggccgtgcgggaccgcaacctgctccgagacgaccgcgtcctgcagaacctgctcaccatcgaggagcgctaccttccgcagtgctcctacttcaagtgcgtgcagaaggacatccaaccctacatgcgcagaatggtggccacctggatgctggaggtctgtgaggaacagaagtgcgaagaagaggtcttccctctggccatgaattacctggaccgtttcttggctggggtcccgactccgaagtcccatctgcaactcctgggtgctgtctgcatgttcctggcctccaaactcaaagagaccagcccgctgaccgcggagaagctgtgcatttacaccgacaactccatcaagcctcaggagctgctggagtgggaactggtggtgctggggaagttgaagtggaacctggcagctgtcactcctcatgacttcattgagcacatcttgcgcaagctgccccagcagcgggagaagctgtctctgatccgcaagcatgctcagaccttcattgctctgtgtgccaccgactttaagtttgccatgtacccaccgtcgatgatcgcaactggaagtgtgggagcagccatctgtgggctccagcaggatgaggaagtgagctcgctcacttgtgatgccctgactgagctgctggctaagatcaccaacacagacgtggattgtctcaaagcttgccaggagcagattgaggcggtgctcctcaatagcctgcagcagtaccgtcaggaccaacgtgacggatccaagtcggaggatgaactggaccaagccagcacccctacagacgtgcgggatatcgacctgtgaggatgccagttgggccgaaagagagagacgcgtccataatctggtctcttcttctttctggttgtttttgttctttgtgttttagggtgaaacttaaaaaaaaaattctgcccccacctagatcatatttaaagatcttttagaagtgagagaaaaaggtcctacgaaaacggaataataaaaagcatttggtgcctatttgaagtacagcataagggaatcccttgtatatgcgaacagttattgtttgattatgtaaaagtaatagtaaaatgcttacaggaaaacctgcagagtagttagagaatatgtatgcctgcaatatgggaacaaattagaggagacttttttttttcatgttatgagctagcacatacacccccttgtagtataatttcaaggaactgtgtacgccatttatggcatgattagattgcaaagcaatgaactcaagaaggaattgaaataaggagggacatgatggggaaggagtacaaaacaatctctcaacatgattgaaccatttgggatggagaagcacctttgctctcagccacctgttactaagtcaggagtgtagttggatctctacattaatgtcctcttgctgtctacagtagctgctacctaaaaaaagatgttttattttgccagttggacacaggtgattggctcctgggtttcatgttctgtgacatcctgcttcttcttccaaatgcagttcattgcagacaccaccatattgctatctaatggggaaatgtagctatgggccataaccaaaactcacatgaaacggaggcagatggagaccaagggtgggatccagaatggagtcttttctgttattgtatttaaaagggtaatgtggccttggcatttcttcttagaaaaaaactaatttttggtgctgattggcatgtctggttcacagtttagcattgttataaaccattccattcgaaaagcactttgaaaaattgttcccgagcgatagatgggatggtttatgcaagtcatgctgaatactcctcccctcttctcttttgccccctcccttcctgcccccagtctgggttactcttcgcttctggtatctggcgttctttggtacacagttctggtgttcctaccaggactcaagagacaccccttcctgctgacattcccatcacaacattcctcagacaagcctgtaaactaaaatctgttaccattctgatggcacagaaggatcttaattcccatctctatacttctcctttggacatggaaagaaaagttattgctggtgcaaagatagatggctgaacatcagggtgtggcattttgttcccttttccgttttttttttttttattgttgttgttaattttattgcaaagttgtattcagcgtacttgaatttttcttcctctccacttcttagaggcattcagttagcaaagaggttggagcaacaacttttttttttttttttgcacaattgtaattgacaggtaatgaagctatttgttaaaatatttgcctttttaagtaaaaaagaaaaatcagaacagggctatttgaagaattattttatacacagattctgccttgtttcatagtatgagggttgaagacggaaaacaatctaagggtctctcatttttttaattttgttttgttcagtttggtttttttttttttttgcgctgctaagaagctaaagtcatccatccttattcacgttgacagtacctagctgtaatgtttcacagagtgtgctgctattttataaacatttttataatatattattttactgcttaaattccaagtcctgaagtagatggttgagatatgagttcttcgtactggaaaagcccttccgtagtttgttttcttctggtagcatattcatggttgtttttttttttcttttttggttttttggttttttttttttcctctgatcacattcttcaaagacggagtattctttacctcaggtttactggacaaaatcaataactacaaaaggcaatgattcacgcttttgttttcataatacctcacaaccgtacagtttctgcttgggagcccattcgcatgaggaatacagaagcagtgtgagcagggctgactccctctcaggtggaaggcagggcggtctcactcccagggacctttttggtcatggaggccatcgggctcccagttagaccctggtatcctcatcatgatggaaaaaatacattgaaccaagggatcctccctccccttcaaggcagacgttcagtacaaacatttatgcggtaggctcagatgtcgtaatttgcacttaggtaccaggtgtcaggaaacagactaaaaagaattccaccaggctgtttggagatcctcatcttggagctttttcaaaagcggggcttcatctgcaaagggccctttcatcttgaagtttttcccctccgtctttcccctcccctggcatggacaccttgtgtttaggatcatctctgcaggtttcctaggtctgaatctgcgagtagatgaacctgcagcaagcagcgtttatggtgcttccttctccctcctctgtctcaaactgcgcaggcaagcactatgcaagcccaggccctctgctgagcggtactaaacggtcgggttttcaatcacactgaattggcaggataagaaaaataggtcagataagtatgggatgatagttgaagggaggtgaagaggctgcttctctacagaggtgaaattccagatgagtcagtctcttgggaagtgtgtttagaagggttcaggactttgtgagttagcatgaccctaaaattctaggggatttctggtgggacaatgggtggtgaattttgaagttttggagagggaagtggagcagccagcaagtaagctagccagagttttctcaagagccagctttgctcagcacactctcctgggccccaaggagtcccacggaatggggaaagtgggaaccctggagttcttgggaatcttggagcctaaagagaaaccgaggtgcaaattcatttcatggtgactgacccttgagcttaaacagaagcagcaaatgaaagaaccggacaaataaggaagggcacaagcctacccgactctatttacagtctgtaactttccactcttcctgtagtcccgaggcccctgggtccttctagcttttctctttcccatccttggggccttgtgtgatgatgggtgtggggctgccgatgggaaagtcgggggttgttaggcttttctgcctgctcctgcttaaacacaagaaggaatcctggattttgccctctccttagctcttagtctctttggtaggagttttgttccagaggagctctcccccttggatttgaacttgctctttttgttgttgttgttctttctcttctttttcttacctcccactaaaggggttccaaattatcctggtctttttctaccttgttgtgtttctatctcgtctttacttccatctgtttgtttttttctccatcagtgggggccgagttgttcccccagcctgccaaattttgatccttcccctcttttggccaaatcctagggggaagaaatcctagtatgccaaaaatatatgctaagcataattaaactccatgcgggtccataacagccaagaagcctgcaggagaaagccaagggcagttccctccgcagaacaccccatgcgtgctgagaggcgagctccttgaagaaggggctgttcttccaggaggccttattttgaactgcctcaggaccccactggagagcacagcatgccttactactgggtcatccttggtctatgtgctctgtactggaggctctgttctgcctcttatcagccaggtcaggggcacacatggcttaagtgacaaagccagaggagaagacaaccctgacagcatcacgctgcatcccattgctagcaggattggcaactcttcagacggagctgcgcttccctgcagtctagcacctctagggcctctccagactgtgccctgggagctctgggactgaaaggttaagaacataaggcaggatcagatgactctctccaagagggcaggggaattttctctccatgggccacaggggacagggctgggagaagaaatagacttgcaccttatgtcatgtaaataattgattttctagttcaagaagataatattggtagtgtgggaattggaggtaggaaggggaggaagtctgagtaagccagttggcttctaagccaaaaggattcctctttgtttatctctgagacagtccaaccttgagaatagctttaaaagggaaattaatgctgagatgataaagtccccttaagccaacaaaccctctgtagctatagaatgagtgcaggtttctattggtgtggactcagagcaatttacaagagctgttcatgcagccatccatttgtgcaaaatagggtaagaagattcaagaggatatttattacttcctcataccacatggcttttgatgattctggattctaaacaacccagaatggtcatttcaggcacaacgatactacattcgtgtgtgtctgcttttaaacttggctgggctatcagaccctattctcggctcaggttttgagaagccatcagcaaatgtgtacgtgcatgctgtagctgcagcctgcatcccttcgcctgcagcctactttggggaaataaagtgccttactgactgtagccattacagtatccaatgtcttttgacaggtgcctgtccttgaaaaacaaagtttctatttttatttttaattggtttagttcttaactgctggccaactcttacatccccagcaaatcatcgggccattggattttttccattatgttcatcacccttatatcatgtacctcagatctctctctctctcctctctctcagttatatagtttcttgtcttggactttttttttcttttctttttctttttttttttgctttaaaacaagtgtgatgccatatcaagtccatgttattctctcacagtgtactctataagaggtgtgggtgtctgtttggtcaggatgttagaaagtgctgataagtagcatgatcagtgtatgcgaaaaggtttttaggaagtatggcaaaaatgttgtattggctatgatggtgacatgatatagtcagctgccttttaagaggtcttatctgttcagtgttaagtgatttaaaaaaataataacctgttttctgactagtttaaagatggatttgaaaatggttttgaatgcaattaggttatgctatttggacaataaactcaccttgacct

SEQ ID NO: 439 - DNA, 596 bp, Homo sapiens
  modified_base (248)..(248): a, c, t or g
ttttttttttttttttttttttttttttgccgcccactcaaactttattcaaagaccaggaagggccggtgcaaggaggggaggagggcccgttgggaggcccagcgggcaggaggaacggttaccgaggctccagcttaacggtatttggaggtcagcacggtgctcacagaagccaggaacttgtccagggaggcgtgcaccgcaggggtgaactcggcggggaggtgggcggccagggtcaccancaggcagtggcttaggagcttgaagttgaccgggtccacccgaagcttgtgcgcgtgcaggtcgctcagggcggacagcgcgttgggcatgtcgtccacgtgcgccacggcgttggtcagcgcgtcggccaccttcttgccgtggcccttaacctgggcagagccgtggctcaggtcgaagtgcgggaagtaggtcttggtggtggggaaggacaggaacatcctctccagggcctccgcaccatactcgccagcgtgcgcgccgaccttaccccaggcggccttgacgttggtcttgtcggcaggagacagcaccatggtgggttctctctgagtctgtggggacca

SEQ ID NO: 440 - DNA, 575 bp, Homo sapiens
actcttctggtccccacagactcagagagaacccaccatggtgctgtctcctgccgacaagaccaacgtcaaggccgcctggggtaaggtcggcgcgcacgctggcgagtatggtgcggaggccctggagaggatgttcctgtccttccccaccaccaagacctacttcccgcacttcgacctgagccacggctctgcccaggttaagggccacggcaagaaggtggccgacgcgctgaccaacgccgtggcgcacgtggacgacatgcccaacgcgctgtccgccctgagcgacctgcacgcgcacaagcttcgggtggacccggtcaacttcaagctcctaagccactgcctgctggtgaccctggccgcccacctccccgccgagttcacccctgcggtgcacgcctccctggacaagttcctggcttctgtgagcaccgtgctgacctccaaataccgttaagctggagcctcggtagccgttcctcctgcccgctgggcctcccaacgggccctcctcccctccttgcaccggcccttcctggtctttgaataaagtctgagtgggcggc

SEQ ID NO: 441 - DNA, 454 bp, Homo sapiens
  modified_base (405)..(405): a, c, t or g
tttttttttttaaaatataaactgacatttatttttgttttagcttgagaccaatcgcatactgagagatttgttaagaggaagatgtggcttgaaaaagataaatgtgaacagaaaataccccctaatgtctcgatgattgaggtttaagaggaagacactgagggaatctgcctctcctactttttccacagttcccagggtggaatctggtgccacagaagtgggctcctgccttaaggagaaagatggtcccagggcttgtagctgtggaagtgcaaggctgtcaacatgatggccagagtccgccccacagaccacacacttttcctagtccctctcatacaagcgcccatagagagccgccgtcaccagcccagaggggcagcctacttttcctcaggnaatagtgggtcattcttccaggccaagctggtcaggggctttctagggg

SEQ ID NO: 442 - DNA, 514 bp, Homo sapiens
  modified_base (129)..(129): a, c, t or g
  modified_base (393)..(393): a, c, t or g
  modified_base (407)..(407): a, c, t or g
  modified_base (414)..(414): a, c, t or g
  modified_base (440)..(440): a, c, t or g
tgaccctgccatcagagtcctcagagactacaaggtgaagcatgttgtgtacccaactgcctggatgaaccagctcccactcttggcagcaattgagattcagaaagcttttgctgttgcctttggatncaacgttctggcagctaatgtccaccacccagttctggggatgacaggaagtggcatacacacccctctggagtccttttggtaccatgacatggaaaatcccaaaagtcaccttataattgcccaggtggccaaaaatccagtgggtctcattggtgcagagaatgcaacaggtgaaacggacccatcccatagtaagtttttaaaaattttgtcaggcgatccgtactgtgagaaggatgctcaggaagtccactgtgatgnagggccaccaagtnggaactngaatggttcctcccacattttcactntgaggttgatgtattgacattttcacctgggtcctgtttgggggaaagggagggttattttccacgtctgtttg

SEQ ID NO: 443 - DNA, 2082 bp, Homo sapiens
agattgctgcctatgcaaagcaggtaagaagccgaactctgaggcctctcgccattgtctccgagtcggccagctggagcgttttcggggctgtaaagggagaatggcgcatgcgcatattcagggcggaaggcgcgctaagagcagatttgtggtctgcattatgtctggagccagaagtaagcttgctcttttcctctgcggctgttacgtggttgccctgggagcccacaccggggaggagagcgtggctgaccatcacgaggctgaatattatgtggctgccgtgtatgagcatccatccatcctgagtctgaaccctctggctctcatcagccgccaagaggccttggagctcatgaaccagaaccttgacatctatgaacagcaagtgatgactgcagcccaaaaggatgtacagattatagtgtttccagaagatggcattcatggattcaactttacaagaacatccatttatccatttttggacttcatgccgtctccccaggtggtcaggtggaacccatgcctggagcctcaccgcttcaatgacacagaggtgctccagcgcctgagttgtatggccatcaggggagatatgttcttggtggccaatcttgggacaaaggagccttgtcatagcagtgacccaaggtgcccaaaagatgggagataccagttcaacacaaatgtcgtgttcagcaataatggaacccttgttgaccgctaccgtaaacacaacctctactttgaggcagcattcgatgttcctcttaaagtggatctcatcacctttgataccccctttgctggcaggtttggcatcttcacatgctttgatatattgttctttgaccctgccatcagagtcctcagagactacaaggtgaagcatgttgtgtacccaactgcctggatgaaccagctcccactcttggcagcaattgagattcagaaagcttttgctgttgcctttggcatcaacgttctggcagctaatgtccaccacccagttctggggatgacaggaagtggcatacacacccctctggagtccttttggtaccatgacatggaaaatcccaaaagtcaccttataattgcccaggtggccaaaaatccagtgggtctcattggtgcagagaatgcaacaggtgaaacggacccatcccatagtaagtttttaaaaattttgtcaggcgatccgtactgtgagaaggatgctcaggaagtccactgtgatgaggccaccaagtggaacgtgaatgctcctcccacatttcactctgagatgatgtatgacaatttcaccctggtccctgtctggggaaaggaaggctatctccacgtctgttccaatggcctctgctgttatttactttacgagaggcccaccttatccaaagagctgtatgccctgggggtctttgatgggcttcacacagtacatggcacttactacatccaagtgtgtgccctggtcaggtgtgggggtcttggcttcgacacctgtggacaggaaatcacagaggccacggggatatttgagtttcacctgtggggcaacttcagtacttcctatatctttcctttgtttctgacctcagggatgaccctagaagtccctgaccagcttggctgggagaatgaccactatttcctgaggaaaagtaggctgtcctctgggctggtgacggcggctctctatgggcgcttgtatgagagggactaggaaaagtgtgtggtctgtggggcggactctggccatcatgttgacagccttgcacttccacaggctacaagccctgggaccatctttctgccttaagggcaggagcccacttctgtggcaccagattccaccctgggaactgtggaaaaagtaggagaggcagattccctcagtgtcttcctcttaaacctcaatcatcgagacattagggggtattttctgttcacatttatctttttcaagccacatcttcctctaacaaatctctcagtatgcgattggtctcaagctaaaacaaaaataaatgtcagtttatattttacacatccaaaaaaaaaaaaaaaaaa

SEQ ID NO: 444 - DNA, 460 bp, Homo sapiens
  modified_base (291)..(291): a, c, t or g
  modified_base (294)..(294): a, c, t or g
  modified_base (324)..(324): a, c, t or g
ttaaattgaaaggaaacttttattgagtcatgttttcaaagcaatctagttttaaaaaaagttgaagacaagacagaaaaaagaacatgacacctaagagaatcagacaggacagacagacgggagcaggggggcggggacagcggctccgtggaggtcagatcttctccatcttggagatgaggtcgtcgcagatcctggtcagctcctcgttctctttagtcttctgctccactgtcttctccagcgactggatgcgcatctgctccttcctcaggctggcctggaggnaancgcttccgcctgggccttgctccggacctngggcgatctcctcgtttgccagctgcagcttctcctccgcgtgggccttcagggctttggtacctctgggccctcctgggtgatccttgccaggtaatcctccacgcacttcttcagtgactcttcgttcttgcgg

SEQ ID NO: 445 - DNA, 2788 bp, Homo sapiens
ggcggcggtagcagccaggcttggcccccggcgtggagcagacgcggacccctccttcctggcggcggcggcgcgggctcagagcccggcaacgggcgggcgggcagaatgagtctgcaggtcttaaacgacaaaaatgtcagcaatgaaaaaaatacagaaaattgcgacttcctgttttcgccaccagaagttaccggaagatcgtctgttcttcgtgtgtcacagaaagaaaatgtgccacccaagaacctggccaaagctatgaaggtgacttttcagacacctctgcgggatccacagacgcacaggattctaagtcctagcatggccagcaaacttgaggctcctttcactcaggatgacacccttggactggaaaactcacacccggtctggacacagaaagagaaccaacagctcatcaaggaagtggatgccaaaactactcatggaattctacagaaaccagtggaggctgacaccgacctcctgggggatgcaagcccagcctttgggagtggcagctccagcgagtctggcccaggtgccctggctgacctggactgctcaagctcttcccagagcccaggaagttctgagaaccaaatggtgtctccaggaaaagtgtctggcagccctgagcaagccgtggaggaaaaccttagttcctattccttagacagaagagtgacacccgcctctgagaccctagaagacccttgcaggacagagtcccagcacaaagcggagactccgcacggagccgaggaagaatgcaaagcggagactccgcacggagccgaggaggaatgccggcacggtggggtctgtgctcccgcagcagtggccacttcgcctcctggtgcaatccctaaggaagcctgcggaggagcacccctgcagggtctgcctggcgaagccctgggctgccctgcgggtgtgggcacccccgtgccagcagatggcactcagacccttacctgtgcacacacctctgctcctgagagcacagccccaaccaaccacctggtggctggcagggccatgaccctgagtcctcaggaagaagtggctgcaggccaaatggccagctcctcgaggagcggacctgtaaaactagaatttgatgtatctgatggcgccaccagcaaaagggcacccccaccaaggagactgggagagaggtccggcctcaagcctcccttgaggaaagcagcagtgaggcagcaaaaggccccgcaggaggtggaggaggacgacggtaggagcggagcaggagaggacccccccatgccagcttctcggggctcttaccacctcgactgggacaaaatggatgacccaaacttcatcccgttcggaggtgacaccaagtctggttgcagtgaggcccagcccccagaaagccctgagaccaggctgggccagccagcggctgaacagttgcatgctgggcctgccacggaggagccaggtccctgtctgagccagcagctgcattcagcctcagcggaggacacgcctgtggtgcagttggcagccgagaccccaacagcagagagcaaggagagagccttgaactctgccagcacctcgcttcccacaagctgtccaggcagtgagccagtgcccacccatcagcaggggcagcctgccttggagctgaaagaggagagcttcagagaccccgctgaggttctaggcacgggcgcggaggtggattacctggagcagtttggaacttcctcgtttaaggagtcggccttgaggaagcagtccttatacctcaagttcgaccccctcctgagggacagtcctggtagaccagtgcccgtggccaccgagaccagcagcatgcacggtgcaaatgagactccctcaggacgtccgcgggaagccaagcttgtggagttcgatttcttgggagcactggacattcctgtgccaggcccacccccaggtgttcccgcgcctgggggcccacccctgtccaccggacctatagtggacctgctccagtacagccagaaggacctggatgcagtggtaaaggcgacacaggaggagaaccgggagctgaggagcaggtgtgaggagctccacgggaagaacctggaactggggaagatcatggacaggttcgaagaggttgtgtaccaggccatggaggaagttcagaagcagaaggaactttccaaagctgaaatccagaaagttctaaaagaaaaagaccaacttaccacagatctgaactccatggagaagtccttctccgacctcttcaagcgttttgagaaacagaaagaggtgatcgagggctaccgcaagaacgaagagtcactgaagaagtgcgtggaggattacctggcaaggatcacccaggagggccagaggtaccaagccctgaaggcccacgcggaggagaagctgcagctggcaaacgaggagatcgcccaggtccggagcaaggcccaggcggaagcgttggccctccaggccagcctgaggaaggagcagatgcgcatccagtcgctggagaagacagtggagcagaagactaaagagaacgaggagctgaccaggatctgcgacgacctcatctccaagatggagaagatctgacctccacggagccgctgtccccgcccccctgctcccgtctgtctgtcctgtctgattctcttaggtgtcatgttcttttttctgtcttgtcttcaactttttttaaaactagattgctttgaaaacatgactcaataaaagtttcctttcaatttaaaaaaaa

SEQ ID NO: 446 - DNA, 451 bp, Homo sapiens
  modified_base (27)..(27): a, c, t or g
  modified_base (379)..(379): a, c, t or g
  modified_base (402)..(402): a, c, t or g
  modified_base (422)..(422): a, c, t or g
  modified_base (438)..(438): a, c, t or g
acatgaacaacataagtatttatttgnaaaacattttccatttaagtaaaatggcaaattagctagagtagcttcttactgctaattctatttgcactcacagtcacttttattcatcatattcaaagatattgctaccaaaaatgatttcacaaagtatttagaaaaaatatatacagtctctctaatagaaagttaattaaaacaacaaagctaggcaatatcaagctaagaaaggaaaccaattgacatatataaacacaaataaataaatatgtacaaaagaatctatgccaacaacagacaaagaaaatctttacaatgcaagtgaatggtggacaagaatgggaaaatctctcagggatccctaggactatgnctctaacacaatggtagtttaanaagaggggaaaaaggaaagnaaaccttatggaaagngagtccggaattg

SEQ ID NO: 447 - DNA, 356 bp, Homo sapiens
aagtgcttagtcaatagtaattaagatatagcttcaaaaatggctttgcttttgatttctactcatattcgtatggctccagaaaaatatttttttcatatttgacaatgtcagctccactttagaaattttcaataaccagatgagaaaaaaattaagaaattgctcaagggaaacatttgtaaatggatttgaaagattgagccaaattctgttgtcagttctaagcatgcagttctcacctccatttagtcccccatcagaacagaggtcaggaatttagctggggagcctaaatttagttcagcttacctttgagaatagcatcaattcagactctcttttcattatgtttt

SEQ ID NO: 448 - DNA, 6902 bp, Homo sapiens
ccaagtacctagggtggtggccgagtcccgcctcccgccagcgggggcgaggacctgcgacgcgcacccctgcctggcccggtctcctcagcaccagccccacgcacaccctacttcctcagcttctcgccctcaccctgccaacttccctgcgaggagggacctgccgccagcctgcttcctcgtccgcaggccctgcgctgaacgctgccgcgcccagggttcaccttgcgccgtcgggaaagcccatgaactctccagaaacggcgtaaaggagggtcccgccgcggcgcagggctggggcgcctgggttccccctgggtggagcagcggcagcagagcgggaaagtggtggaggatgatcttgcggccaaaggggacctcggcgcagtaatgtcaacatgatgtttcgctcagatcgaatgtggagctgccattggaaatggaagcccagtcctctcctgttcttatttgctttatatatcatgtgtgttcctcactcagtgtggggatgtgccaactgccgagtggttttgtccaacccttctgggacctttacttctccatgctaccctaacgactacccaaacagccaggcttgcatgtggacgctccgagcccccaccggttatatcattcagataacatttaacgactttgacattgaagaagctcccaattgcatttatgactcattatcccttgataatggagagagccagactaaattttgtggagcaactgccaaaggcctatcatttaactcaagtgcgaatgagatgcatgtgtccttttcaagtgactttagcatccagaagaaaggtttcaatgccagctacatcagagttgccgtgtccttaaggaatcaaaaggtcattttaccccagacatcagatgcttaccaggtatctgttgcaaaaagcatctctattccagagctcagtgctttcacactctgctttgaagcaaccaaagttggccatgaagacagtgattggacagctttctcctactcaaatgcatccttcacacaattgctcagttttggaaaggccaagagtggctactttctatccatttctgattcaaaatgtttgttgaataatgcattacctgtcaaagaaaaagaagacatttttgcagaaagctttgaacagctctgccttgtttggaataattctttgggctctattggtgtaaatttcaaaagaaactatgaaacagttccatgtgattctaccattagtaaagttattcctgggaatgggaaattgttgttgggctccaatcaaaatgaaattgtctctctaaaaggggacatttataactttcgactttggaattttaccatgaatgccaaaatcctctccaacctcagctgtaatgtgaaagggaatgtagtcgactggcaaaatgacttctggaatatcccaaacctagctctgaaagctgaaagcaacctaagctgtggttcctacctgatcccgctcccagcagcagaactggccagctgtgcagacctggggaccctctgtcaagctactgtaaactctcctagtactacaccacccactgtcaccactaacatgcctgttactaacagaatcgataaacaaaggaatgatggaattatctatagaatatccgtagtgattcagaacatccttcgtcaccctgaggtaaaagtacagagcaaggtggcagaatggctcaattcaaccttccaaaattggaactacacggtttatgtcgttaatatcagttttcacctgagtgctggagaggacaagattaaagtcaagagaagccttgaggatgagccaaggttggtgctttgggcccttctagtttacaatgctaccaacaatactaatttagaaggaaaaatcattcagcagaagctcctaaaaaataatgagtccttggatgaaggcttgaggctacatacagtgaatgtgagacaactgggtcattgtcttgccatggaggaacccaaaggctactactggccatctatccaaccttctgaatacgttcttccttgtccagacaagcctggcttttctgcttctcggatatgtttttacaatgctaccaacccattggtaacctactggggacctgttgatatctccaactgtttaaaagaagcaaatgaagttgctaaccagattttaaatttaactgctgatgggcagaacttaacctcagccaatattaccaacattgtggaacaggtcaaaagaattgtgaataaagaagaaaacattgatataacacttggctcaactctaatgaatatattttctaatatcttaagcagttcagacagtgacttgcttgagtcatcttctgaagctttaaaaacaattgatgaattggccttcaagatagacctaaatagcacatcacatgtgaatattacaactcggaacttggctctcagcgtatcatccctgttaccagggacaaatgcaatttcaaattttagcattggtcttccaagcaataatgaatcgtatttccagatggattttgagagtggacaagtggatccactggcatctgtaattttgcctccaaacttacttgagaatttaagtccagaagattctgtattagttagaagagcacagtttactttcttcaacaaaactggacttttccaggatgtaggaccccaaagaaaaactttagtgagttatgtgatggcgtgcagtattggaaacattactatccagaatctgaaggatcctgttcaaataaaaatcaaacatacaagaactcaggaagtgcatcatcccatctgtgccttctgggatctgaacaaaaacaaaagttttggaggatggaacacgtcaggatgtgttgcacacagagattcagatgcaagtgagacagtctgcctgtgtaaccacttcacacactttggagttctgatggaccttccaagaagtgcctcacagttagatgcaagaaacactaaagtcctcactttcatcagctatattgggtgtggaatatctgctattttttcagcagcaactctcctgacatatgttgcttttgagaaattgcgaagggattatccctccaaaatcttgatgaacctgagcacagccctgctgttcctgaatctcctcttcctcctagatggctggatcacctccttcaatgtggatggactttgcattgctgttgcagtcctgttgcatttcttccttctggcaacctttacctggatggggctagaagcaattcacatgtacattgctctagttaaagtatttaacacttacattcgccgatacattctaaaattctgcatcattggctggggtttgcctgccttagtggtgtcagttgttctagcgagcagaaacaacaatgaagtctatggaaaagaaagttatgggaaagaaaaaggtgatgaattctgttggattcaagatccagtcatattttatgtgacctgtgctgggtattttggagtcatgttttttctgaacattgccatgttcattgtggtaatggtgcagatctgtgggaggaatggcaagagaagcaaccggaccctgagagaagaagtgttaaggaacctgcgcagtgtggttagcttgacctttctgttgggcatgacatggggttttgcattctttgcctggggacccttaaatatccccttcatgtacctcttctccatcttcaattcattacaaggcttatttatattcatcttccactgtgctatgaaggagaatgttcagaaacagtggcggcggcatctctgctgtggtagatttcggttagcagataactcagattggagtaagacagctaccaatatcatcaagaaaagttctgataatctaggaaaatctttgtcttcaagctccattggttccaactcaacctatcttacatccaaatctaaatccagctctaccacctatttcaaaaggaatagccacacagacagtgcttccatggacaagtccttgtcaaaactggcccatgctgatggagatcaaacatcaatcatccctgtccatcaggtcattgataaggtcaagggttattgcaatgctcattcagacaacttctataaaaatattatcatgtcagacaccttcagccacagcacaaagttttaatgtctttaagaaaaagaaatcaatctgcagaaatgtgaagatttgcaagcagtgtaaactgcaactagtgatgtaaatgtgctattacctaggtaactgcatatatataaggaatgtattttgttaagaaggcttttgtgaaattcagaatttttctttttaatatatttcttccatggaagagttgtcatcactaaaacttcagtactgagagtaacatgactcagtagccacagaagctatgatttgtaaaatatataattgaatcagagtaatcataatgcaggggagacattcaaattagagacaagggagaagcaatgctgaggaagaccctagatagagctcattttactccacctaatcgttatatctggatatacccattttctgcatcttctttctcaacaataaaaaatgtaactattttgaatgcccacaaatcccattccagtgttactttctgtgaatgcagtaccatattctcattttcaatgacatttcaaccacaggcagaaaagactgtttactccttgacccaaagattaaaaaggattttttattattttaaatattacaccttcagaaccataacatgcttaagaaaactttcccaaaatgttgacctagttaaatgaggctatataaatttctaatattttacttattctattcaaggcatagggccaaagcattaagtataatttaatcccatacattcgagttaagtttagtgttgatgttccatcattctggacctcccaggagttgtttaagaatgaatctcttacacctctacttttgcccctctactgtatattaagcccataggcttgtgggaggaaggagaatttccattaggcaagctgtatgcagtggaattttccttttaggagacacacaattaagactctctggttctgtccttgctttggagactttaagacatttcctaaagcacaaataaaagcctcgtatttccccattgagagttttgttccaaggaatatgaagtgagacatatgggtgagtcataataatcaaaataatttatgaagagctgggtctgcaatagctagtctaaaaactacttgtgtgtcagtcctctggttatagtatataagagcctgaggaggtctggcaagatagatggtgtattatttatggatcaggctgctgcatacaaaccttgcatactattatgcagcttacctaactctcagactattctgagtaatgcttgcttgctaatgaatgtataggagaccacattgtaattgttcttagatgatggagtccatgcagtttcttagaaatcggtctcagtgcatgctgtgctttttcacatttgctctgggttatctgggaagtatcaggttctgggaggcaacagcattaagtgataagaaaaggagacattctggcaaagccaatctgcttaaaggcaaagtccagaacctggaacctagaggcctttctctctgcacgaaaaacaggtagtttgcagtctgagatatgggagagcttttaggctacacagcaacccaagggacctctcaccttttgctgagcttcaatcaggaagctatttgcctggctccagcagatgatgagataatgaggtagtgggttttttattactgttccattttgcaacatcctgcaacaccatcctgggagacaagagcattacccagcttggctttcacgggggagggttgtattcagtaaaaaagaatagtaaatataaggtcactgagattctaagtaagatagtaaatctaaggtcactgagccaaatccttttcaataggcatatattaacaggctgcttattttggcggaggttacatatggatgaaaatgaatcttagtcactgaatattcatatacatttcccccaaaaccttagacattcatagtagattttaattagttagctttctaactagtcagatttctgcccaaagtgcttagtcaatagtaattaagatataggtaattaagatatagcttcaaaaatggctttgcttttgatttctactcatattcgtatggctccagaaaaatatttttttcatatttgacaatgtcagctccactttagaaattttcaataaccagatgagaaaaaaattaagaaattgctcaagggaaacatttgtaaatggatttgaaagattgagccaaattctgttgtcagttctaagcatgcagttctcacctccatttagtcccccatcagaacagaggtcaggaatttagctggggagcctaaatttagttcagcttacctttgagaatagcatcaattcagactctcttttcattatgttttcttttctttttccctctttttaaactacattgtgttagagtcatagtctaggatcctgagagattttccattcttgtcaccattcacttgcattgtaaagattttctttgtctgttgttggcatagattcttttgtacatatttatttatttgtgtttatatatgtcaattggtttcctttcttagcttgatattgcctagctttgttgttttaattaactttctattagagagactgtatatattttttctaaatactttgtgaaatcatttttggtagcaatatctttgaatatgatgaataaaagtgactgtgagtgcaaatagaattagcagtaagaagctactctagctaatttgccattttacttaaatggaaaatgtttttcaaataaatacttatgttgttc

SEQ ID NO: 449 - DNA, 543 bp, Homo sapiens
  modified_base (314)..(314): a, c, t or g
  modified_base (399)..(399): a, c, t or g
aagtaccctattttggaggggaaaaaagttaataaatatataacatttattaacttttgtggaaaaattaaatttccctttggtttcagaattaccactttttctcataaaattatttatttcatttggtccattcaaatgtcaggaatcaggatatttccctgtatgcgtttcaaaataaaaagctccttcatctattgtggcttttacattatgcttatgagtcttgcctaactcaagtaagcataaattagggatattatacaggcatcactttctcctatactttgaaaattcaacattctctgaaaacncccctttgtttcaagtagtaagttaagacatatttaatatgataaactacctgaaggtgctccaacccaagccagaccaagtacngccatcatcaaaatctcggtctgtgaagacatagggccaaacagtagtcatcatgattctgctcagaattcaattccagaaacttctccacaccaatatttgggaaacggaaggatttgtaggggccttctcatcagcagttgg

SEQ ID NO: 450 - DNA, 454 bp, Homo sapiens
  modified_base (18)..(18): a, c, t or g
  modified_base (35)..(35): a, c, t or g
  modified_base (57)..(57): a, c, t or g
  modified_base (151)..(151): a, c, t or g
  modified_base (373)..(373): a, c, t or g
  modified_base (433)..(433): a, c, t or g
atattctagtaattagtnaaaatacagggttttanatccttgtaagtgtcaccatangtaggagattaggactaaaggagacttgttcagagaattaaatttgaaaaactatacttcctttactaaaggttttgaaagcaaaacttgtttnttcttcccaagtgttcagtgttcaggaatctggtgaatacttgctcagaaatttaacatcttcaattttaatttccctacctagcctttcttttttatttgttgttattgttttgccttctgtgatcagctcagggatgtgggcagtgggaacaacctttagaagccttaatttcaggcctgattttccatgggagcatattgtccaggtgtacgcagaagnaggtggagcagacattcacactaaagctcggccaacattaattaccttaccaaataatgntttggattttagatccataca

SEQ ID NO: 451 - DNA, 3410 bp, Homo sapiens
gaattcgaggatccgggtaccatgggcggcggcaggcctagcagcacgggaaccgtcccccgcgcgcatgcgcgcgcccctgaagcgcctgggggacgggtatgggcgggaggtaggggcgcggctccgcgtgccagttgggtgcccgcgcgtcacgtggtgaggaaggaggcggaggtctgagtttcgagggagggggggagagaagagggaacgagcaagggaaggaaagcggggaaaggaggaaggaaacgaacgagggggagggaggtccctgttttggaggagctaggagcgttgccggcccctgaagtggagcgagagggaggtgcttcgccgtttctcctgccaggggaggtcccggcttcccgtggaggctccggaccaagccccttcagcttctccctccggatcgatgtgctgctgttaacccgtgaggaggcggcggcggcggcagcggcagcggaagatggtgttgctgagagtgttaattctgctcctctcctgggcggcggggatgggaggtcagtatgggaatcctttaaataaatatatcagacattatgaaggattatcttacaatgtggattcattacaccaaaaacaccagcgtgccaaaagagcagtctcacatgaagaccaatttttacgtctagatttccatgcccatggaagacatttcaacctacgaatgaagagggacacttcccttttcagtgatgaatttaaagtagaaacatcaaataaagtacttgattatgatacctctcatatttacactggacatatttatggtgaagaaggaagttttagccatgggtctgttattgatggaagatttgaaggattcatccagactcgtggtggcacattttatgttgagccagcagagagatatattaaagaccgaactctgccatttcactctgtcatttatcatgaagatgatattaactatccccataaatacggtcctcaggggggctgtgcagatcattcagtatttgaaagaatgaggaaataccagatgactggtgtagaggaagtaacacagatacctcaagaagaacatgctgctaatggtccagaacttctgaggaaaaaacgtacaacttcagctgaaaaaaatacttgtcagctttatattcagactgatcatttgttctttaaatattacggaacacgagaagctgtgattgcccagatatccagtcatgttaaagcgattgatacaatttaccagaccacagacttctccggaatccgtaacatcagtttcatggtgaaacgcataagaatcaatacaactgctgatgagaaggaccctacaaatcctttccgtttcccaaatattggtgtggagaagtttctggaattgaattctgagcagaatcatgatgactactgtttggcctatgtcttcacagaccgagattttgatgatggcgtacttggtctggcttgggttggagcaccttcaggaagctctggaggaatatgtgaaaaaagtaaactctattcagatggtaagaagaagtccttaaacactggaattattactgttcagaactatgggtctcatgtacctcccaaagtctctcacattacttttgctcacgaagttggacataactttggatccccacatgattctggaacagagtgcacaccaggagaatctaagaatttgggtcaaaaagaaaatggcaattacatcatgtatgcaagagcaacatctggggacaaacttaacaacaataaattctcactctgtagtattagaaatataagccaagttcttgagaagaagagaaacaactgttttgttgaatctggccaacctatttgtggaaatggaatggtagaacaaggtgaagaatgtgattgtggctatagtgaccagtgtaaagatgaatgctgcttcgatgcaaatcaaccagagggaagaaaatgcaaactgaaacctgggaaacagtgcagtccaagtcaaggtccttgttgtacagcacagtgtgcattcaagtcaaagtctgagaagtgtcgggatgattcagactgtgcaagggaaggaatatgtaatggcttcacagctctctgcccagcatctgaccctaaaccaaacttcacagactgtaataggcatacacaagtgtgcattaatgggcaatgtgcaggttctatctgtgagaaatatggcttagaggagtgtacgtgtgccagttctgatggcaaagatgataaagaattatgccatgtatgctgtatgaagaaaatggacccatcaacttgtgccagtacagggtctgtgcagtggagtaggcacttcagtggtcgaaccatcaccctgcaacctggatccccttgcaacgattttagaggttactgtgatgttttcatgcggtgcagattagtagatgctgatggtcctctagctaggcttaaaaaagcaatttttagtccagagctctatgaaaacattgctgaatggattgtggctcattggtgggcagtattacttatgggaattgctctgatcatgctaatggctggatttattaagatatgcagtgttcatactccaagtagtaatccaaagttgcctcctcctaaaccacttccaggcactttaaagaggaggagacctccacagcccattcagcaaccccagcgtcagcggccccgagagagttatcaaatgggacacatgagacgctaactgcagcttttgccttggttcttcctagtgcctacaatgggaaaacttcactccaaagagaaacctattaagtcatcatctccaaactaaaccctcacaagtaacagttgaagaaaaaatggcaagagatcatatcctcagaccaggtggaattacttaaattttaaagcctgaaaattccaatttgggggtgggaggtggaaaaggaacccaattttcttatgaacagatatttttaacttaatggcacaaagtcttagaatattattatgtgccccgtgttccctgttcttcgttgctgcattttcttcacttgcaggcaaacttggctctcaataaacttttaccacaaattgaaataaatatatttttttcaactgccaatcaaggctaggaggctcgaccacctcaacattggagacatcacttgccaatgtacataccttgttatatgcagacatgtatttcttacgtacactgtacttctgtgtgcaattgtaaacagaaattgcaatatggatgtttctttgtattataaaatttttccgctcttaattaaaaattactgtttaattgacatactcaggataacagagaatggtggtattcagtggtccaggattctgtaatgctttacacaggcagttttgaaatgaaaatcaatttaccccatggtacccggatcctcgaattc

SEQ ID NO: 452 - DNA, 441 bp, Homo sapiens
aaaggggaaaaatctttaattgatttctcaggtaatttttttccagattgtacataaagtgttcttatgttctctatttggatgtttcaggagacatacaaatgaaatacagtacatagacaaatgaaatgctaataagaagtaggatgatattaaaatatccttactttgcctgtatggaacaaaggcagtctactccatcggggaatcaaagcaaatgtgaataagaggtttccaccttgcaaaactgtgagcttcatttgccctggagagaactactaggcaaggcttcacatgacagtacctgtagggatgtccatggggctgtgaagcaggtgtattgtatccgaacatgcagctgcaatgaaggcgtggagctcaggagaagcagccactgacaatgcccctcctggccgcaggtcttctgtgcagcctcccatg

SEQ ID NO: 453 - DNA, 2129 bp, Homo sapiens
gtactcggccgcctgagcgccgacccacgccctgcctgctcttccagtccagccaacactctaagcaggcaccgcctccactcgcagcccccgggatgggtcccactccctaccgcagatccccaggccccctccacccagtcggctagccctcgcctctgccatccgatactaaaatgtctgatgatgctggtgacaccttagccactggagacaaagcagaagttactgagatgcctaatagtgattctttacctgaggatgcagaagtgcattgtgattcagctgcagtttcacatgagccaacaccagctgaccccagaggggaggggcatgaaaatgcagctgtgcagggtgcaggggctgccgccattgggccccctgtgcagcctcaggatgccaacgccctggagccccctctcaatagagacgtgactgaggatacacttgctgaatgtattgattccgtcagccttgaggcagaacccagatccgaaatacccctgcaagaacagaattatccggctgtggattcccctccaagtggaggaggatgggcaggctggggatcctggggcaaatctctgctgtcgtcagcatctgccacagtaggtcatggattgacggcagtcaaggaaaaagcaggagccactctacggattcatggtgtaaattctggatcttctgaaggagcccaaccaaatactgaaaacggagtccctgaaataacagatgcagccacagatcagggccctgcagaaagcccacccacttccccttcatcagcctctcggggtatgctgtctgccatcaccaatgtggttcaaaacacaggtaaaagtgtcttaactggaggccttgatgcgttggaattcatcggcaagaaaaccatgaatgtccttgcagaaagtgacccgggctttaagcggaccaagacgctcatggagagaactgtttccttgtctcagatgttaagggaagctaaggagaaggagaagcagagactggcacagcagctcacgatggagagaaccgcgcactacgggatgctgtttgatgaatatcaaggcttgtcacacctggaagccctggaaattctgtccaatgaaagcgaaagcaaggttcagtcatttttagcatcacttgatggagagaagctggaactcttaaaaaatgacctaatttccattaaagacatctttgcagccaaagaattagagaatgaagaaaatcaagaagaacaaggcttagaagaaaagggagaagaatttgctcgcatgcttacagagcttctctttgaattacatgtggcggccacacctgacaaactcaataaggccatgaagagggctcatgactgggtggaagaggatcaaaccgtggtgtcagtagatgtggcaaaagtgtccgaagaagaaacaaagaaggaagaaaaggaagagaaatctcaagaccctcaagaagacaaaaaggaggaaaagaaaactaagaccatagaggaagtatacatgtcgtccattgaaagtctggcggaggtaacagcgcgctgtattgagcagcttcataaagtagcagaattaattcttcatggacaagaagaggaaaaaccagctcaggaccaagcaaaagttctaataaaattaactactgcaatgtgcaatgaagtggcctctttatcaaagaagtttacgaattctttaaccactgttgggagcaacaagaaggccgaggtccttaaccccatgatcagtagtgtattgttagagggctgcaacagtacaacgtacatacaggatgccttccagctgctgctgcctgttctgcaggtctcacatatccagaccagttgtttgaaagcacagccgtgacctggccagactccatctagttaaaggagacagctggccgccttgcctcaatatgtaccatttaaggggatgttctctgtgcgcctggccacagacatccatttgaggacactacaagcaattttgcacagacaatattgagaatgcaaatttagagagagttatcatttctctcaatgtgtataattgtttttacaaacaattgtgttttctttatgttaatttaaacttacacagcttatattgaaaaaaaaaaaaaaa

SEQ ID NO: 454 - DNA, 418 bp, Homo sapiens
caattataaattttatttaagaatactgactaacacaggaaacagatttaattcatggaattgtgcatatggtcatccgttacattgtgacatgttaattttttttttatcatttattggcactgtcaacagattacttgtgaacaagatcactttgtacgcttaagtctgcgatgctacttagctatggttttctaccatgagcttatatatagataggtgtaggtatgtagatacattaatgctatacacaattttgcatggttactgagcgtcagtaaaaattatgaaaaaacacccatttataataaaagtgaggatgtactaagacttgctattactggaccttgttttctgtaaaagtgatgacacttgctggacggttactaaactctatggcactaatgtatgatggatt

SEQ ID NO: 455 - DNA, 590 bp, Homo sapiens
  modified_base (18)..(18): a, c, t or g
  modified_base (46)..(46): a, c, t or g
  modified_base (263)..(263): a, c, t or g
  modified_base (491)..(491): a, c, t or g
  modified_base (520)..(520): a, c, t or g
  modified_base (583)..(583): a, c, t or g
  modified_base (589)..(589): a, c, t or g
accaaaccattattcatntattggcttaagtatgctttctcctganaactttagcattgggtgcaaatattcagtatggttctcggagtccaaagggttttaagccagggcacaaccagaaaagtggctctctttggtagggagaggggctccaatatttcgttctctccccatggggcactgacagagaaatgaaatagttttatctggaaaattccagagctattatttactccttaccaagggaagttacttcttgtaanaacttttaagccatttatcaacaagttcttgttgactcagggcataatgagttcctgagacatgctcttttgggggctggggctttaggtagaagaatttcaaggaaaagaattctcagcagagctcaagattgtagaaactcagccagaagctggtaaaaacatggggagcccggaggacaggctgctgtccagggccagaggccatgaagaagtgctccccgtggncggacagtctgggaatggaatccatcatnccattagtgccatagagtttagtaccggccagcaagtggcatcacttttccagaaacaaaggncaggtna

SEQ ID NO: 456 - DNA, 4830 bp, Homo sapiens
gggagtccggcgagtcgctgggggaagtcgagcagacacccagcgctgccggaactcggggcgcgcatcccgcaagtcggaacccggcggatcggatcccgcagatcggagacggggcctggagggtggcagcacgcaaagggtgtccctgtccctcaaggggtcatggcctccatgttgctcgcccagcgcctggcctgcagcttccagcacagctaccgcctgctggtgcctggatccagacacattagtcaagctgcagccaaagtcgacgttgaatttgattatgatgggcctctgatgaagacggaagtcccagggcctagatctcaggagttaatgaaacagctgaatataattcagaatgcagaggctgtgcattttttctgcaattacgaagagagccgaggcaattacctggttgatgtggacggcaaccgaatgctggatctttattcccagatctcctctgtccccataggttacagccaccccgccctgctgaaactcatccaacagcctcaaaatgcgagcatgtttgtcaacagacccgccctcggaatcctgcctccggagaactttgtggagaagctccggcagtccttgctctcggtggctcccaaagggatgtcccagctcatcaccatggcctgcggctcctgctccaatgaaaacgccttaaagaccatcttcatgtggtaccggagcaaggaaagagggcagaggggcttctcccaggaggagctggagacgtgcatgattaaccaggcccctggctgccccgactacagcatcctctccttcatgggcgcgttccatgggaggaccatgggttgcttagcgaccacgcactctaaagccattcacaagatcgacatcccttcctttgactggcccatcgcaccgttcccacggctgaaataccctctggaagagtttgtgaaagagaaccaacaggaggaggcccgctgtctggaagaggtggaggatctgattgtgaaatatcggaaaaagaagaagacggtggccgggatcatcgtggagcccatccagtccgagggtggagacaaccacgcatccgatgacttctttcggaagctgagagacatcgccaggaagcatggctgcgccttcttggtggacgaggtccagaccggaggaggctgcacgggcaagttctgggcccatgagcactggggcctggatgacccagcagacgtgatgaccttcagcaagaagatgatgactgggggcttcttccacaaggaggagttcaggcctaatgctccctaccggatcttcaacacctggctgggggacccgtccaagaacctgttgctggctgaggtcatcaacatcatcaagcgggaggacctgctaaataatgcagcccatgccgggaaggccctgctcacaggactgctggacctccaggcccggtacccccagttcatcagcagggtgagaggacgaggcaccttttgctccttcgatactcccgatgattccatacggaataagctcattttaattgccagaaacaaaggtgtggtgttgggtggctgtggtgacaaatccattcgtttccgtcccacgctggtcttcagggatcaccacgctcacctgttcctcaatattttcagtgacatcttagcagacttcaagtaaagaagccatttccactacagtgagaaagcccggatcccaacagttgtcaaattgattagtttgcctaattcatgttttcacttaaaagtatcagaggtgaatgcacagtgaagggtgatttgtggggagggagcatttttggtggtcttgggggaggggaggggagggaagggctggtgttgattttcctccctgcagagccaatggtgcacattggtttaagcccagagatcctgcttgagccctggactcatcttgggaagggccatgggaggtcctggctagagttctgcccaaccttgaccaaccccagcaatttttccaaaagccagtcaagggcattacatttgttcctgggactggcagctgggcctcctgggtgccagtccatctcaagtgccatattctgtgatcacggatgttggctccccctcgccctatgcaagcaaacacactctcacctcctctcccagcctcccggagctctgagcacgccccacgcatggtgcaggagggactggacagatctgaggaaggccgtaaaatggggacaggaggattcagctcaggagtaagggaagaggtcctctggccccctgaagatgagaatcacccctctcagtgcacctggggatccccctaaactgtgaattctgccctggacagggctttgcccttggaggatccccaggtggccttacccgtgattcttactcggcatcctccattccccaaactccctcctccctgttaaatgtcaacctagacctggacctgggtgggaggaaactgtagcctgagtgtccacagggacacacgtgagccacagggctagaagcacaggcccgtcaccccaggaggaaaagcccagggtctggggcagcagagccatcgcatcatgtttcccagggcaacttgaggtctgacttttggctccctcgccctaagaggctcttcctctcttttgctcatccaccttcacaccacttgtgagctgacccccaggaacagcttggctgttccaccagagcagagggaatcattgctggactggatttcttctggagggaagcaccatgaattaaaggtgccagagctccatgcatggaaaagtggcctgttggttcaacgtggtttccttgtacttgatcctcctgaaatgagagattttcctgagatgactgagtatggagattaccaggcagatgataccgaaatgcttaaaggggctgtggctgaggctgtagcatctctgctggaggtgagacactctgggaactgatttgacctcgaatgctcctaaaagagaacttgatagcctgacagcagagaagtattatttggtggggagtctgagaaagcctggcttgtattatctgtccaaaaggaagcctcttcatctcccggtgccttggttgactattttggaaataggcatatcaaggttcctgattcagcactttgctcttttaataacaaatcgtccaaagatctcaaagtaagggtttttttttttagcttccactcttccgcagacttggtcatcgacctatttttgttgaagaatgaaaggcaatgacaagtttaacatatacaaattcgtgaattcttgttcattttgcattcctgcagtcagtgctaatccgtcgttcttaatcaggagttctgccaggtttaaggtcacctgcactcccagccaagtggtgatgtatgcctcccactctctgcaaggttttcctcatttttatattcatttattcatcattcattcattcacctaactttcattaaatagctgcaccatcccaggccctgtgcggagcatcgggaatacaaagatgagataaaacattgtccctgcccccgggggctcacatgccactggaaacaacagactcttaaactaacaattcaagcaggcgccaagtgctacgacagaggtgtgaataaaagcatcaggaaatcggatggagaaccaccattcacccaagggtcagaggaggtttcaaagaaaaggtgtcattggagcagtgttttgcagaatgagccagagttcaccaagcaggcaaggcaaggaagggtgttgcagagagggaacagcatatgcaaaggcatatcagttcatggcatcacatctttcactggggaagccagtttccacaggcagcatcccaaggttcaataaggccttatttaacaagcaagcaaaatgcaaaccaaaccattattcatttattggcttaagtatgctttctcctgaaaactttagcattgggtgcaaatattcagtatggttctcggagtccaaagggttttaagccagggcacaaccagaaaagtggctctctttggtagggagaggggctccaatatttcgttctctccccatggggcactgacagagaaatgaaatagttttatctggaaaattccagagctattatttactccttaccaagggaagttacttcttgtaaaaacttttaagccatttatcaacaagttcttgttgactcagggcataatgagttcctgagacatgctcttttgggggctggggctttaggtagaagaatttcaaggaaaagaattctcagcagagctcaagattgtagaaactcagcagaagctggtaaaaacatggggagcccggaggacaggctgctgtccagggcagaggccatgaagaagtgcttccgtggccgacagtctggaaatgaatccatcatacattagtgccatagagtttagtaaccgtccagcaagtgtcatcacttttacagaaaacaaggtccagtaatagcaagtcttagtacatcctcacttttattataaatgggtgttttttcataatttttactgacgctcagtaaccatgcaaaattgtgtatagcattaatgtatctacatacctacacctatctatatataagctcatggtagaaaaccatagctaagtagcatcgcagacttaagcgtacaaagtgatcttgttcacaagtaatctgttgacagtgccaataaatgataaaaaaaaaattaacatgtcacaatgtaacggatgaccatatgcacaattccatgaattaaatctgtttcctgtgttagtcagtattcttaaataaaatttataattgaaacatgaaaaaaaaaaaaaaaaaa

SEQ ID NO: 457 - DNA, 484 bp, Homo sapiens
  modified_base (301)..(301): a, c, t or g
  modified_base (441)..(441): a, c, t or g
  modified_base (451)..(451): a, c, t or g
  modified_base (462)..(462): a, c, t or g
acttgtcaaactgtttatttgccattcacactgattgtaacactggatttacagaagaaactgtggtacaaagagaggaaggctctggtggctcctgaacagcagcagtccagctgccctgctcaggctgggcacgacgaatgctcccaggagaggggaggcggcccacccgactgtgtaccgtggactgtggacagtgcagtgcctgctctcctgtgctatctagaaacaccttggagagagggttctgggatattctctcatgtcatctggctgaagacaccagcttgacagttccccnttaagaaagcatttccataacgttttgtaccaagggagaaagaagccccacgcaacgaatttttcagggatgtttttgttgacccaaccccaataacttgggccacaccaaaatagacccctaggtgggggggctgggcntaaaatagtnaccacattttnccgttggctttttttcaagtaa

SEQ ID NO: 458 - DNA, 448 bp, Homo sapiens
  modified_base (113)..(113): a, c, t or g
  modified_base (128)..(128): a, c, t or g
  modified_base (393)..(393): a, c, t or g
  modified_base (401)..(401): a, c, t or g
  modified_base (406)..(406): a, c, t or g
  modified_base (412)..(412): a, c, t or g
  modified_base (421)..(421): a, c, t or g
gctctgattagaaaggaaatgaatggttccactcaaatgtcctgcaatttaggattgcagatttctgccttgaaatacctgtttctttgggacattccgtcctgatgattttnatttttgttggtttntatttttggggggaatgacatgtttgggtcttttatacatgaaaatttgtttgacaataatctcacaaaacatattttacatctgaacaaaatgcctttttgtttaccgtagcgtatacatttgttttgggatttttgtgtgtttgttgggaattttgtttttagccaggtcagtattgatgaaggcctgatcaattttgggctccttttttttcccttcccagaaagaagttggcatccaaccaaaagttaattgggaatttantgtaatgnaaaantaggantttaaagcntccaattattaaaaaattggtaaatgg

SEQ ID NO: 459 - DNA, 7288 bp, Homo sapiens
catagagccagcgggcgcgggcgggacgggcgccccgcggccggacccagccagggcaccacgctgcccggccctgcgccgccaggcacttctttccggggctcctagggacgccagaaggaagtcaacctctgctgcttctccttggcctgcgttggaccttcctttttttgttgtttttttttgtttttcccctttcttccttttgaattaactggcttcttggctggatgttttcaacttctttcctggctgcgaacttttccccaattgttttccttttacaacagggggagaaagtgctctgtggtccgaggcgagccgtgaagttgcgtgtgcgtggcagtgtgcgtggcaggatgtgcgtgcgtgtgtaacccgagccgcccgatctgtttcgatctgcgccgcggagccctccctcaaggcccgctccacctgctgcggttacgcggcgctcgtgggtgttcgtgcctcggagcagctaaccggcgggtgctgggcgacggtggaggagtatcgtctcgctgctgcccgagtcagggctgagtcacccagctgatgtagacagtggctgccttccgaagagtgcgtgtttgcatgtgtgtgactctgcggctgctcaactcccaacaaaccagaggaccagccacaaacttaaccaacatccccaaacccgagttcacagatgtgggagagctgtagaaccctgagtgtcatcgactgggccttcttatgattgttgttttaagattagctgaagatctctgaaacgctgaattttctgcactgagcgttttgacagaattcattgagagaacagagaacatgacaagtacttctagctcagcactgctccaactactgaagctgattttcaaggctacttaaaaaaatctgcagcgtacattaatggatttctgttgtgtttaaattctccacagattgtattgtaaatattttatgaagtagagcatatgtatatatttatatatacgtgcacatacattagtagcactacctttggaagtctcagctcttgcttttcgggactgaagccagttttgcatgataaaagtggccttgttacgggagataattgtgttctgttgggactttagacaaaactcacctgcaaaaaactgacaggcattaactactggaacttccaaataatgtgtttgctgatcgttttactcttcgcataaatattttaggaagtgtatgagaattttgccttcaggaacttttctaacagccaaagacagaacttaacctctgcaagcaagattcgtggaagatagtctccactttttaatgcactaagcaatcggttgctaggagcccatcctgggtcagaggccgatccgcagaaccagaacgttttcccctcctggactgttagtaacttagtctccctcctcccctaaccacccccgcccccccccaccccccgcagtaataaaggcccctgaacgtgtatgttggtctcccgggagctgcttgctgaagatccgcgcccctgtcgccgtctggtaggagctgtttgcagggtcctaactcaatcggcttgttgtgatgcgtatccccgtagatgccagcacgagccgccgcttcacgccgccttccaccgcgctgagcccaggcaagatgagcgaggcgttgccgctgggcgccccggacgccggcgctgccctggccggcaagctgaggagcggcgaccgcagcatggtggaggtgctggccgaccacccgggcgagctggtgcgcaccgacagccccaacttcctctgctccgtgctgcctacgcactggcgctgcaacaagaccctgcccatcgctttcaaggtggtggccctaggggatgttccagatggcactctggtcactgtgatggctggcaatgatgaaaactactcggctgagctgagaaatgctaccgcagccatgaagaaccaggttgcaagatttaatgacctcaggtttgtcggtcgaagtggaagagggaaaagcttcactctgaccatcactgtcttcacaaacccaccgcaagtcgccacctaccacagagccatcaaaatcacagtggatgggccccgagaacctcgaagacatcggcagaaactagatgatcagaccaagcccgggagcttgtccttttccgagcggctcagtgaactggagcagctgcggcgcacagccatgagggtcagcccacaccacccagcccccacgcccaaccctcgtgcctccctgaaccactccactgcctttaaccctcagcctcagagtcagatgcaggatacaaggcagatccaaccatccccaccgtggtcctacgatcagtcctaccaatacctgggatccattgcctctccttctgtgcacccagcaacgcccatttcacctggacgtgccagcggcatgacaaccctctctgcagaactttccagtcgactctcaacggcacccgacctgacagcgttcagcgacccgcgccagttccccgcgctgccctccatctccgacccccgcatgcactatccaggcgccttcacctactccccgacgccggtcacctcgggcatcggcatcggcatgtcggccatgggctcggccacgcgctaccacacctacctgccgccgccctaccccggctcgtcgcaagcgcagggaggcccgttccaagccagctcgccctcctaccacctgtactacggcgcctcggccggctcctaccagttctccatggtgggcggcgagcgctcgccgccgcgcatcctgccgccctgcaccaacgcctccaccggctccgcgctgctcaaccccagcctcccgaaccagagcgacgtggtggaggccgagggcagccacagcaactcccccaccaacatggcgccctccgcgcgcctggaggaggccgtgtggaggccctactgaggcgccaggcctggcccggctgggccccgcgggccgccgccttcgcctccgggcgcgcgggcctcctgttcgcgacaagcccgccgggatcccgggccctgggcccggccaccgtcctggggccgagggcgcccgacggccaggatctcgctgtaggtcaggcccgcgcagcctcctgcgcccagaagcccacgccgccgccgtctgctggcgccccggccctcgcggaggtgtccgaggcgacgcacctcgagggtgtccgccggccccagcacccaggggacgcgctggaaagcaaacaggaagattcccggagggaaactgtgaatgcttctgatttagcaatgctgtgaataaaaagaaagattttatacccttgacttaactttttaaccaagttgtttattccaaagagtgtggaattttggttggggtggggggagaggagggatgcaactcgccctgtttggcatctaattcttatttttaatttttccgcaccttatcaattgcaaaatgcgtatttgcatttgggtggtttttatttttatatacgtttatataaatatatataaattgagcttgcttctttcttgctttgaccatggaaagaaatatgattcccttttctttaagttttatttaacttttcttttggacttttgggtagttgtttttttttgttttgttttgtttttttgagaaacagctacagctttgggtcatttttaactactgtattcccacaaggaatccccagatatttatgtatcttgatgttcagacatttatgtgttgataattttttaattatttaaatgtacttatattaagaaaaatatcaagtactacattttcttttgttcttgatagtagccaaagttaaatgtatcacattgaagaaggctagaaaaaaagaatgagtaatgtgatcgcttggttatccagaagtattgtttacattaaactccctttcatgttaatcaaacaagtgagtagctcacgcagcaacgtttttaataggatttttagacactgagggtcactccaaggatcagaagtatggaattttctgccaggctcaacaagggtctcatatctaacttcctccttaaaacagagaaggtcaatctagttccagagggttgaggcaggtgccaataattacatctttggagaggatttgatttctgcccagggatttgctcaccccaaggtcatctgataatttcacagatgctgtgtaacagaacacagccaaagtaaactgtgtaggggagccacatttacataggaaccaaatcaatgaatttaggggttacgattatagcaatttaagggccaccagaagcaggcctcgaggagtcaatttgcctctgtgtgcctcagtggagacaagtgggaaaacatggtcccacctgtgcgagaccccctgtcctgtgctgctcactcaacaacatctttgtgttgctttcaccaggctgagaccctaccctatggggtatatgggcttttacctgtgcaccagtgtgacaggaaagattcatgtcactactgtccgtggctacaattcaaaggtatccaatgtcgctgtaaattttatggcactatttttattggaggatttggtcagaatgcagttgttgtacaactcataaatactaactgctgattttgacacatgtgtgctccaaatgatctggtggttatttaacgtacctcttaaaattcgttgaaacgatttcaggtcaactctgaagagtatttgaaagcaggacttcagaacagtgtttgatttttattttataaatttaagcattcaaattaggcaaatctttggctgcaggcagcaaaaacagctggacttatttaaaacaacttgtttttgagttttcttatatatatattgattatttgttttacacacatgcagtagcactttggtaagagttaaagagtaaagcagcttatgttgtcaggtcgttcttatctagagaagagctatagcagatctcggacaaactcagaatatattcactttcatttttgacaggattccctccacaactcagtttcatatattattccgtattacatttttgcagctaaattaccataaaatgtcagcaaatgtaaaaatttaatttctgaaaagcaccattagcccatttcccccaaattaaacgtaaatgttttttttcagcacatgttaccatgtctgacctgcaaaaatgctggagaaaaatgaaggaaaaaattatgtttttcagtttaattctgttaactgaagatattccaactcaaaaccagcctcatgctctgattagataatcttttacattgaacctttactctcaaagccatgtgtggagggggcttgtcactattgtaggctcactggattggtcatttagagtttcacagactcttaccagcatatatagtatttaattgtttcaaaaaaaatcaaactgtagttgttttggcgataggtctcacgcaacacatttttgtatgtgtgtgtgtgtgcgtgtgtgtgtgtgtgtgtgaaaaattgcattcattgacttcaggtagattaaggtatctttttattcattgccctcaggaaagttaaggtatcaatgagacccttaagccaatcatgtaataactgcatgtgtctggtccaggagaagtattgaataagccatttctactgcttactcatgtccctatttatgatttcaacatggatacatatttcagttctttctttttctcactatctgaaaatacatttccctccctctcttccccccaatatctccctttttttctctcttcctctatcttccaaaccccactttctccctcctccttttcctgtgttctcttaagcagatagcacatacccccacccagtaccaaatttcagaacacaagaaggtccagttcttcccccttcacataaaggaacatggtttgtcagcctttctcctgtttatgggtttcttccagcagaacagagacattgccaaccatattggatctgcttgctgtccaaaccagcaaactttcctgggcaaatcacaatcagtgagtaaatagacagcctttctgctgccttgggtttctgtgcagataaacagaaatgctctgattagaaaggaaatgaatggttccactcaaatgtcctgcaatttaggattgcagatttctgccttgaaatacctgtttctttgggacattccgtcctgatgatttttatttttgttggtttttatttttggggggaatgacatgtttgggtcttttatacatgaaaatttgtttgacaataatctcacaaaacatattttacatctgaacaaaatgcctttttgtttaccgtagcgtatacatttgttttgggatttttgtgtgtttgttgggaattttgtttttagccaggtcagtattgatgaggctgatcatttggctctttttttccttccagaagagttgcatcaacaaagttaattgtatttatgtatgtaaatagattttaagcttcattataaaatattgttaatgcctataactttttttcaatttttttgtgtgtgtttctaaggactttttcttaggtttgctaaatactgtagggaaaaaaatgcttctttctactttgtttattttagactttaaaatgagctacttcttattcacttttgtaaacagctaatagcatggttccaattttttttaagttcactttttttgttctaggggaaatgaatgtgcaaaaaaagaaaaagaactgttggttatttgtgttattctggatgtataaaaatcaatggaaaaaaataaactttcaaattgaaatgacggtataacacatctactgaaaaagcaacgggaaatgtggtcctatttaagccagcccccacctagggtctatttgtgtggcagttattgggtttggtcacaaaacatcctgaaaattcgtgcgtgggcttctttctccctggtacaaacgtatggaatgcttcttaaaggggaactgtcaagctggtgtcttcagccagatgacatgagagaatatcccagaaccctctctccaaggtgtttctagatagcacaggagagcaggcactgcactgtccacagtccacggtacacagtcgggtgggccgcctcccctctcctgggagcattcgtcgtgcccagcctgagcagggcagctggactgctgctgttcaggagccaccagagccttcctctctttgtaccacagtttcttctgtaaatccagtgttacaatcagtgtgaatggcaaataaacagtttgacaagtacatacaccataaaaaaaaaaaaaaaa

SEQ ID NO: 460 - DNA, 428 bp, Homo sapiens
  modified_base (417)..(417): a, c, t or g
tcctttttgaacaggtccaatgatttcagatcttctggaaaaggctttttgtcatttgcttctatttccacaacacttacatcagtgaaattgccatctgaatacatttgatcttttgaattaaaattgtgccttggaggagtgtgaggtgaccactgggcaatatgactctttgaaggatctggaacattaggccagatgtgttttttaattaggtctcgcttattaaagcagaacagcactcccagaagagttgtcaataggaatgctaagcaaacaggcacgactatggcttcaatttctccttgagcaaactttggggtaagtaaaagtgaattcttggaccatccttcccacctttcatctgtgtatgctgccattccgtaccatggtacaatggtgtcactagtcaaaganggacaatgtat

SEQ ID NO: 461 - DNA, 452 bp, Homo sapiens
  modified_base (379)..(379): a, c, t or g
  modified_base (386)..(386): a, c, t or g
  modified_base (421)..(421): a, c, t or g
  modified_base (434)..(434): a, c, t or g
aacttccaagaaattttaatcaaacctgaggggataatacaagatttaataaaattgccacagtgtaatagttatctgtaacaaagtaatcaggcacgaaatacctgttttacaagtcatttgaaaggtatctcatttgcatgagtcataaatgtgtgggttgacataatagcactgtttcctgccactaagttttcagtaaatatgtgattgataatattcagtcatcttggattccagctcatctctttgaaacctgacgatgtctataaaaatcaaatggtattagtggctccaaaagaaactaagaaacaaaataatagtgtgtgtatttcggggttgggggccgggaagaaaagtaaaatagaaattaaggacnggttacnggtgtacccattaggttttccggtaatgggccacnggaatggaatacnggtcctttaagttaggaa

SEQ ID NO: 462 - DNA, 1398 bp, Homo sapiens
atgcggccggggggcgcactgctcgccctgctcgccagcctgctgctgctgctgctgctgcgcctgctctggtgcccggcagacgcgcccggccgcgccaggattctggtggaggaaagcagggaggccacccacggcacccccgcagcgctgaggacgctccggagcccggcgaccgcggtaccgcgcgccactaacagcacatatctgaatgagaagtcgctccaactgacggagaaatgcaaaaatctgcaatatggcattgagtctttctctaacaaaacgaaagggtattcagagaacgactaccttcagattatcacagatatacagagttgtccatggaaacggcaagcagaagaatatgcaaattttagagccaaacttgcttcctgctgtgatgctgttcaaaactttgttgtttctcagaataacactccagttgggactaatatgagttacgaggtggaaagcaaaaaagaaatcccaattaagaagaacatttttcatatgtttccagtgtcccagccttttgtggactacccttataatcagtgtgcagtggtcggaaatgggggaattctgaataagtctctctgtggaactgaaatagataaatccgacttcgtttttaggtgtaacctacccccaaccacaggagatgttagtaaagatgttggcagtaaaacaaatcttgtgactataaatccaagcatcataactctgaaatatgggaacttaaaggaaaaaaaagccctatttctggaggacattgcaacctatggagatgcattttttcttctgccagcattttccttcagggccaacacgggtacctctttcaaagtatactacacgctcgaagagtctaaagcaagacaaaaggttctatttttccatcccaagtacctgaaagatctggcccttttctggagaactaaaggtgtgactgcataccgcttgtccaccggcttgatgatcacaagtgttgcagtggaactgtgtaaaaatgtgaagctgtatggattctggcccttctctaaaactgtagaagacatacctgtcagccatcactattatgacaacaagctacctaaacatggtttccatcagatgcccaaagaatacagccagatcctccaacttcacatgaaaggaatcctcaaactgcaatttagcaaatgtgaagtcgcctaaacaaagtatcttaaaatgggaataattttaatataatgcagtaggtgattaacaatgtctccaaacaccaaaggaggtggctaaagagtattttgagatgagccccaaaatttggtttgaccaaagcttccccactcattttgcaatgatggcaagtcattcaatccttctcatcttcattttttctccttataacatgga

SEQ ID NO: 463 - DNA, 228 bp, Homo sapiens
  modified_base (181)..(181): a, c, t or g
  modified_base (199)..(199): a, c, t or g
  modified_base (221)..(221): a, c, t or g
ttttttttttttttttttttaaaacaaacttaactttatttcctcactttcacttaaaacttgattttataaaacacatgaaaaaacatttttaagagttctgtatcacagaacattaaacagtacaaatatccattgcttcataggttcaagttacataaattaaagtcaaataattggnaactgattcaataggggnaaactatacatgaaatgaaggncaaaagg

SEQ ID NO: 464 - DNA, 384 bp, Homo sapiens
  modified_base (121)..(121): a, c, t or g
aagtgctgttggagccgctgtggttgctgtccgcggagtgaagcgcgtgcttttgtttgtgtccctggccatggcgctgcagctctcccgggagcagggaatcaccctgcgcgggagcganaatcgtggccgagttcttctcattcggcatcaacagcattttatatcagcgtggcatatatccatctgaaacctttactcgagtgcagaaatacggactcaccttgcttgtaactactgatcttgagctcataaaatacctaaataatgtggtggaacaactgaaagattggttatacaagtgttcagttcagaaactggttgtagttattcttcaaatatttgaaagtgggtgaggtcctgggaaagatgggcagttttgat

SEQ ID NO: 465 - DNA, 1390 bp, Homo sapiens
gggaagtgctgttggagccgctgtggttgctgtccgcggagtggaagcgcgtgcttttgtttgtgtccctggccatggcgctgcagctctcccgggagcagggaatcaccctgcgcgggagcgccgaaatcgtggccgagttcttctcattcggcatcaacagcattttatatcagcgtggcatatatccatctgaaacctttactcgagtgcagaaatacggactcaccttgcttgtaactactgatcttgagctcataaaatacctaaataatgtggtggaacaactgaaagattggttatacaagtgttcagttcagaaactggttgtagttatctcaaatattgaaagtggtgaggtcctggaaagatggcagtttgatattgagtgtgacaagactgcaaaagatgacagtgcacccagagaaaagtctcagaaagctatccaggatgaaatccgttcagtgatcagacagatcacagctacggtgacatttctgccactgttggaagtttcttgttcatttgatctgctgatttatacagacaaagatttggttgtacctgaaaaatgggaagagtcgggaccacagtttattaccaattctgaggaagtccgccttcgttcatttactactacaatccacaaagtaaatagcatggtggcctacaaaattcctgtcaatgactgaggatgacatgaggaaaataatgtaattgtaattttgaaatgtggttttcctgaaatcaggtcatctatagttgatatgttttatttcattggttaatttttacatggagaaaaccaaaatgatacttactgaactgtgtgtaattgttcctttatttttttggtacctatttgacttaccatggagttaacatcatgaatttattgcacattgttcaaaaggaaccaggaggtttttttgtcaacattgtgatgtatattcctttgaagatagtaactgtagatggaaaaacttgtgctataaagctagatgctttcctaaatcagatgttttggtcaagtagtttgactcagtataggtagggagatatttaagtataaaatacaacaaaggaagtctaaatattcagaatctttgttaaggtcctgaaagtaactcataatctataaacaatgaaatattgctgtatagctccttttgaccttcatttcatgtatagttttccctattgaatcagtttccaattatttgactttaatttatgtaacttgaacctatgaagcaatggatatttgtactgtttaatgttctgtgatacagaactcttaaaaatgttttttcatgtgttttataaaatcaagttttaagtgaaagtgaggaaataaagttaagtttgttttaaaaaaaaaaaaaaaaaa

SEQ ID NO: 466 - DNA, 572 bp, Homo sapiens
  modified_base (202)..(202): a, c, t or g
  modified_base (207)..(207): a, c, t or g
  modified_base (441)..(441): a, c, t or g
  modified_base (463)..(463): a, c, t or g
  modified_base (490)..(490): a, c, t or g
  modified_base (551)..(551): a, c, t or g
  modified_base (566)..(566): a, c, t or g
taatgacttttggtttttgtctttgtttttaatcatggtcccaaaggcagaaggcagtattttatctactaagtcacacagcttgtgagaggaaaggatgtctgtgtcaggcatgttaacttcaaacaaaatctgagatcggctttttccattgacattcttagcacagcacccaaagaagtataatctagccacagtgtgntaatnaatgaggcacggcttattgcagctggaaatcaattatcctcacgctgaggtggggattctagtgttcctttgactctgtggatactccccaaatggtgtctgtcattcctgtgccacgacctcagcttgcatcctatcagtctttgggggaaggaaaaggggagtacagactagtgttacaagaatctaaaggtacccaagattttacacgtagtctaatatttgagaactgangggctatctaaatacccggaangcacctttcttggaatgctaagacggngcagcaaagattttctagccccggggggctggggaaaagggaagtttggttgggttgggtnggttaattaattacncggggg

SEQ ID NO: 467 - DNA, 423 bp, Homo sapiens
  modified_base (61)..(61): a, c, t or g
cttacagtataacttgcagtttcttgtatgtcaggtagctgttagggtcttgttctgtgangatggcatggtgcctcagcctttgcatatactctctcagtattaactcccagtaaataataaccaaccaaccaaccaaacttccctctcccagcccccgaggctagaaaatcttgctgctccgtcttagcattccaagaaagtgcttccaggtatttagatagccctcagttctcaaatattagactacgtgtaaaatcttgggtacctttagattcttgtaacactagtctgtactcccttttccttccccaagactgataggatgcaagctgaggtcgtggcacaggaatgacagacaccatttggggagtatccacagagtcaaaggaacactagaatccccaccttcaggcggtggag

SEQ ID NO: 468 - DNA, 2427 bp, Homo sapiens
cctcaagtctctttcctcacttctttctcttcacttaaaacaatttttttggaggggttttggggaggaagtgagcggacgctggggatgggtctcgtaagcggccggattgagaggagggaggaagcagggggcttccgagtgggtgacccagacgcgggctgtggggtggggcagttcgtggggtccggtcctggaaaggcgtcgactgccccccaactcttctggtttcctctacgatgagcggaaggtttgaatcctggaggtggggtctccggtgtggagttctggaaactgtgaggtgatttgcagctggtggaatggaacagtgaagaagcattggaatggtagataacgcagatcatctctggaaaggatattgatccgcctcatgtaaagtatgcttagttcctttccagtggttttgctggaaaccatgtctcattatacagatgaacccagatttaccatagagcagatagatctgcttcagcgacttcggcgtactggaatgactaaacatgaaattctccatgccttggaaactttggaccgtcttgatcaagagcatagtgacaagtttggaagaaggtccagctatggaggaagttcatatgggaatagtactaacaatgtcccagcatcttcctctacagctacagcttccacacagacgcagcattcgggaatgtccccgtcacctagcaacagttatgatacttccccacagccttgcactaccaatcaaaatgggagggagaataatgagcgattatctacatccaatggaaagatgtcaccaactcgctaccatgcaaacagcatgggtcagaggtcatacagttttgaagcctcagaagaggacctagatgtagatgataaagtggaagaattaatgaggagggacagcagtgtgataaaagaggaaatcaaagcctttcttgccaatcggaggatttcccaagcagttgttgcacaggtaacaggtatcagtcagagccggatctctcattggctgttgcagcagggatcagacctgagtgaacagaagaaaagagcattttaccgatggtatcaacttgagaagacaaaccctggcgctacactaagtatgagaccagcccccattccaatagaggaccctgaatggagacaaacgcctcccccagtctctgccacatctggtactttccgactgcgacgagggagtcgatttacctggagaaaggagtgcctggctgttatggaaagttacttcaatgagaatcaatacccagatgaagcaaagagggaagaaattgcaaacgcttgcaatgcagttatacagaagccaggcaaaaagctgtcagatctggaaagagttacctccctgaaagtatataattggtttgctaacagaaggaaggagatcaagaggagagccaatattgaagcagcaatcctggagagtcatgggatagatgtgcagagtccaggaggccactcaaacagtgatgatgtcgacgggaatgactactctgagcaggatgacagtacgagccatagtgaccaccaagaccccatctcattagctgtggaaatggcagcagtcaaccacactatcttggcattggcccgacaaggagccaacgaaatcaagacagaggccctggatgatgactgatcagggaggttaaacatgacaagttaacttagtttagacgtagcaccttagcagactttcctcggtccttaacatgtgttcttacagtataacttgcagtttcttgtatgtcaggtagctgttagggtcttgttctgtgaagatggcatggtgccctcagcctttgcatatactctctcagtattaactcccagtaaataataaccaaccaaccaaccaaccaaacttccctctcccagcccccgaggctagaaaatcttgctgctccgtcttagcattccaagaaagtgcttccaggtatttagatagccctcagttctcaaatattagactacgtgtaaaatcttgggtacctttagattcttgtaacactagtctgtactcccttttccttccccaagactgataggatgcaagctgaggtcgtggcacaggaatgacagacaccatttggggagtatccacagagtcaaaggaacactagaatccccacctcagcgtgaggataattgatttccagctgcaataagccgtgcctcattatagccacactgtggctagattatacttctttgggtgctgtgctaagaatgtcaatggaaaaagccgatctcagattttgtttgaagttaacatgcctgacacagacatcctttcctctcacaagctgtgtgacttagtagataaaatactgccttctgcctttgggaccatgattaaaaacaaagacaaaaaccaaaagtcattaaaaaaaaaaaaaaaaa

SEQ ID NO: 469 - DNA, 514 bp, Homo sapiens
  modified_base (178)..(178): a, c, t or g
  modified_base (366)..(366): a, c, t or g
  modified_base (426)..(426): a, c, t or g
  modified_base (449)..(449): a, c, t or g
  modified_base (513)..(513): a, c, t or g
ctgtgaacaatcaagctttatttttacaaaaatgaaaattgtagcatgtctcaacagccagcctgaggtagggctggtacagaactcactcagaactgctgggttccctttgctctttcttggtttcaaagcaaaaccaggccacagtgccccaggaatgaacccccagccccgagangtttggtcaagggtgaggtctggctggtgcaggaggtattggcagcctcacctttccttccaggaaggggcagaaaggaaccatctgggaaggtgggagcacctcacctcactctgtaggctgtcatggctctaataaggggtataggatgggcctctccaggcaagatccttgctctggccaaacangggacgcaaggccgagtttcagccgcactctaaaagcagcaggtcctgcctctccaacanggttcctgggagggactgcatcnctggtaagtctccaaagtcccaggagtcagaagcctctagttgcaaggtgcctgagcctgggcng

SEQ ID NO: 470 - DNA, 373 bp, Homo sapiens
  modified_base (34)..(36): a, c, t or g
ggcttctgactcctgggactttggagcttaccannnatgcagtccctcccaggaacctgttggagaggcaggacctgctgctttagagtgcggctgaacccgggccttgcgtccctgtttggccagagcaaggatctggctggagaggccatcctataccccttattagagccatgacagcctacagagtgaggtgaggtgctcccaccttcccagatggttcctttctgccccttcctggaagaaaggtgaggctgccaatagcctcctggcaccagcagacctcacccttgaccaacctctcggggctgggggttcattcctggggcactggtgggcctggttttgctttgaaaaccaagaaagaagcaaa

SEQ ID NO: 471 - DNA, 2303 bp, Homo sapiens
ggggaagggaaaagcgagagcggggcaaggcggaagaggaagcggggcggaagggaagcccgggccgcagacggcgaaggaggcagccgggccgggggctgacgcgggagcgagggcatgcccaagggaggaagcagagggaggcagaagcgtggaggaaggggcgagaggcatcgtcaagggagtcgaggggagcgcaggggccgggaaggaggcacaaggaagagagtatgggaagaaggaggaatggagggtcagggctaggcggcgggagggcgccaggccgggaagagcacagggacgagggggtcaggcttgggccgacatcgcggggacaggggtggccatggcggcggcggccggggaggaggaggaggaggaggaggcggctcgggagtcggctgcccgcccggccgcggggcctgcgctctggcgcctgccggaggagctgctgctgctcatctgctcctacctggacatgcgggccctcggccgcctggcccaggtgtgccgctggctgcggcgcttcaccagctgcgatctgctctggcgccggatagcccgggcctcgctcaactccggcttcacgcggctcggcaccgacctgatgaccagtgtcccagtgaaggaacgagtgaaggtgtctcagaactggagactggggcgctgccgagaggggattctgctgaagtggagatgcagtcagatgccctggatgcagctagaggatgattctctgtacatatcccaggctaatttcatcctggcctaccagttccgtccagatggtgccagcttgaatcgtcggcctctgggagtctttgctgggcatgatgaggacgtttgccactttgtgctggccaactcgcatattgttagtgcaggaggggatgggaagattggcattcataagattcacagcaccttcactgtcaagtactcggctcatgaacaggaggtgaactgtgtggattgcaaagggggcatcattgtgagtggctccagggacaggacggccaaggtgtggcctttggcctcaggccggctggggcagtgcttacacaccatccagactgaagaccgagtctggtccattgctatcagcccattactcagctcttttgtgacagggacggcttgttgcgggcacttctcacccctgagaatctgggacctcaacagtgggcagctgatgacacacttgggcagtgactttcccccaggggctggggtgctggatgtcatgtatgagtcccctttcacactgctgtcctgtggctatgacacctatgttcgctactgggacctccgcaccagcgtccggaaatgtgtcatggagtgggaggagccccacgacagcaccctgtactgcctgcagacagatggcaaccacctgctggccacaggttcctcctactacggtgttgtacggctgtgggaccggcgtcaaagggcctgcctgcacgccttcccgctgacgtcgactcccctcagcagccctgtgtactgcctgcgtctcaccaccaagcatctctatgctgccctgtcttacaacctccacgtcctggattttcaaaacccatgaccgtcagggccacccctgcctctgggccagggaaaccagctactcagggacttctcttgcctggagggtgcagtgatagctcctcctcactgccccactgtgctcctgggcctgtgaccccagtgctcaggcaccttgcactagaggcttctgactcctgggactttggagcttaccagagatgcagtccctcccaggaacctgttggagaggcaggacctgctgctttagagtgcggctgaacccgggccttgcgtccctgtttggccagagcaaggatctggcctggagaggcccatcctataccccttattagagccatgacagcctacagagtgaggtgaggtgctcccaccttcccagatggttcctttctgccccttcctggaaggaaaggtgaggctgccaatagcctcctggcaccagccagacctcacccttgaccaacctctcggggctgggggttcattcctggggcactgtggcctggttttgctttgaaaccaagaaagagcaaagggaacccagcagttctgagtgagttctgagccagccctacctcaggctggctgttgagacatgctacaattttcatttttgtaaaaataaagcttgattgttcacagaaaaaaaaaaaaaaaaaaaaaaaaaaaaaaaaaaaaaaaaaaaaaaaaaaaaaaaaaaaaaaaaaaaaaaaaaaaaaaaaaaaaaaaaaaaa

SEQ ID NO: 472 - DNA, 696 bp, Homo sapiens
  modified_base (37)..(37): a, c, t or g
  modified_base (41)..(41): a, c, t or g
  modified_base (69)..(71): a, c, t or g
  modified_base (73)..(74): a, c, t or g
  modified_base (229)..(229): a, c, t or g
  modified_base (231)..(233): a, c, t or g
  modified_base (236)..(237): a, c, t or g
  modified_base (488)..(488): a, c, t or g
  modified_base (496)..(496): a, c, t or g
  modified_base (517)..(517): a, c, t or g
  modified_base (552)..(552): a, c, t or g
  modified_base (576)..(576): a, c, t or g
  modified_base (591)..(591): a, c, t or g
  modified_base (600)..(600): a, c, t or g
  modified_base (609)..(609): a, c, t or g
  modified_base (627)..(627): a, c, t or g
  modified_base (635)..(635): a, c, t or g
  modified_base (648)..(648): a, c, t or g
  modified_base (654)..(654): a, c, t or g
  modified_base (662)..(662): a, c, t or g
  modified_base (673)..(673): a, c, t or g
  modified_base (696)..(696): a, c, t or g
caactaaaattaccctcactaaagggaataacttggnccanagttttttttttttttttttttttatcnnngnnttttgtttttatttacaaataattgtttttattaggccatttggaaaaccactaacattttttattttagaaaacattaaataataaacaagatgttatacagtactttggataacttcttccatcagtttagtgcaatgtatcattggcatctnannngtnnatttttcatttattttcccctttcatcttcagctgtgcagttatatgaccataaaggaaatgaaccattaaaaatgggatctacagccatatattctgccgttactcaaaggcttaaatggatttattttccccctccagccctgcctttaccaggttaaatgacagaagaccttctattggtacctattgttcaaaaaatattactgttctgtggaacctggggagagtccaattgataagagaaactgnatcatacngatgaggtgaaggaaaggtcngccggtgtggggcagggcctctttctcagcagccnagataacttggcccccccgaagcngagagaatgccccgntgaaaatcnccctgaacngggtccctggaagggtcncctaaaanaaaaaaatccggnacctcntccctggnaccaatggaanggcctatacccttaccctggagn

SEQ ID NO: 473 - DNA, 450 bp, Homo sapiens
  modified_base (95)..(95): a, c, t or g
tttttttcttactgatatcaagacatttttatttattaaacatgttgtcaaacagaaaacaaaaggtccaggtagctctttctttgtgcccttgnaattgaatgttgccaccactgttctgggtgcagaggggaaatggaaggcaaggacagcagagccagcacttgaccaggggcccgctggttacggacgacggaaaattgactgatccaagtggacaggtaagccattttcacaagcaacaacaacgtttctgaaccccgctgtggctcggtactggcatggaggccagggggaacctccatgtagcttgcaagtggtgacctggaaagaagacttgcttattcttaggttttctctgtgagggtttccattcttgttttcacagatggccttgatgctgcgcttgttgccatgaataaatgtgttgatgtctttgcagggtgaggt

SEQ ID NO: 474 - DNA, 310 bp, Homo sapiens
  modified_base (300)..(300): a, c, t or g
  modified_base (307)..(307): a, c, t or g
ctcacacaaggacgccaaccccacctagatgcaaagcaggattcaaaagaacatctttgcgttttctaccggctccccatcatcgtactagggaggaagaagcgggtgagaaacaaaacttctttccattgtcctgcccgtttctgcggacttgttctgaggccgaggagcctgtgttggaagagatggtgatgggcctgggcgttttgttgttggtcttcgtgctgggtctgggtctgaccccaccgaccctggctcaggataactccaggtacacacacttcctgacccagcactatnatggcanaac

SEQ ID NO: 475 - DNA, 643 bp, Homo sapiens
  modified_base (282)..(282): a, c, t or g
  modified_base (304)..(304): a, c, t or g
  modified_base (436)..(436): a, c, t or g
  modified_base (502)..(502): a, c, t or g
  modified_base (548)..(548): a, c, t or g
  modified_base (588)..(588): a, c, t or g
  modified_base (598)..(598): a, c, t or g
  modified_base (607)..(607): a, c, t or g
  modified_base (622)..(622): a, c, t or g
tctaatcaatgtgaaagacctgagggtttgttgttccgatggtgtgtttgttacagactagagctccactggctatgactccccacaaccaggaagcctaaccaggggtggggaggtgggagtccaggcatgcagggcaggaaaaacccttgctggtcatccaggccaaccttcaatgcgctgcaaatgtccttgctatctggtccctaacagatggtccttacttcatcacagcctccctggatgctgaatgagtagacggaagctccaaaaacatccatngcaggaaggacagcggcacagngagtcactggatggtcattacaaacatcaccctttgcccagtgtctggcagcacatgatcagcctctccttttctcactgggagagcaaaactactggaagataatctttttagacacacgcaaaaccccanagtttccaaaaccggggccaaccttttctctgccaggcaccttagagcaatagtgcctatttggangctgtgtgggatcagcctgaaatgcagggttaatcgggatagcccnggtgccatctagaaggccctacccacatgaagggagtctncaggggttanctgaggacngcagatccaggaggncactagctctcatgttatgaa

SEQ ID NO: 476 - DNA, 510 bp, Homo sapiens
  modified_base (12)..(12): a, c, t or g
  modified_base (18)..(19): a, c, t or g
ggcacaagtgancccccnnctcagcctcctaagaacccaggattataggtgtgcgccactgcttctggctgggcatctttttttaaaagtcctaatgtacagctgcaattgtgaaacattcattacctgttttcatatttagaatgagggtaatccttctagaggcacacaaagttagctgagtagcaaaaagctgggtctcaaaccaaggtcttctaatttcaaatatcatgttttatctactttaccatgaagctgaattgtgtgagcacaattatgaggtctcctttgcctcccaccctcgctgtattgtccattttccaaggtaaacacacccagttctttcagttctttttactctgtgatttcagtgccttctgctctcctagtaataatatatttaccagccagcatatatttatgatcagtatacatttgtgatgcattctatgggccaggtacagggctaggcattgggactccagagtgcctggaggagaagatccccct

SEQ ID NO: 477 - DNA, 2151 bp, Homo sapiens
gctttccttttagcttttgtaagttacacgtcaaaatggccgatctgacatcggtgctcacttctgttatgttttctccctctagtaaaatgtttatcggtggactgagctggcagacctcaccagatagccttagagactattttagcaaatttggagaaattagagaatgtatggtcatgagagatcccactacgaaacgctccagaggcttcggtttcgtcacgttcgcagacccagcaagtgtagataaagtattaggtcagccccaccatgagttagattccaagacgattgaccccaaagttgcatttcctcgtcgagcgcaacccaagatggtcacaagaacaaagaaaatatttgtaggcgggttatctgcgaacacagtagtggaagatgtaaagcaatatttcgagcagtttggcaaggtggaagatgcaatgctgatgtttgataaaactaccaacaggcacagagggtttggctttgtcacttttgagaatgaagatgttgtggagaaagtctgtgagattcatttccatgaaatcaataataaaatggtagaatgtaagaaagctcagccgaaagaagtcatgttcccacctgggacaagaggccgggcccggggactgccttacaccatggacgcgttcatgcttggcatggggatgctgggatatcccaacttcgtggcgacctatggccgtggctaccccggatttgctccaagctatggctatcagttcccagactatttgccggtttcacaagacataatttttatcaactagctcttaagagaggcatagcaaagtgggggttgctaccatttctagagagagaggacacagtcccggcctgggctgcccccgctccagtcaatgctcactgaaagtctgtcttagctgcctgtttgaatgactgttctttttctcatttttaattcttggactcatgtcctcattgcttcactcaattaaaaaaaaattattctccagtcccctcccactttgcttcttgtatgcattgtgaccgaccccacttcctcagaatgtaacggggccagagggaaacttctcacaaacttcgtagagcctcctcaggggaagctaggaagaagacatcaaatgtttttaagtcatgaccaaacaggcttgttggggacatatcatggggtgagctttgaagtgctggtggtccagaggggttgcagatacgtgacttggagcacccgtgtcttacgatggacagtgataaaggtgaacacacagagacagactattctctaagaatgtgagaaacctgatctggaagaggagctatataaacactatctgactatctttgtcttttggggccagtggctgttggcataatcacaagcctgtctgtcttcgagaagggacagtggagtcatccaggtgctgccacatgacaggcacggtgggcaccgatccacagtgggccccgccttccccagctcgcctccctgcctgtgctggcctggccttgcctgctggcaccattggagtaggagggggtggaacacagggggcccatcctgatcaggccccatctcaaggttggcactcctgcccatcacccttagaaggatcttttcccatggcttgacttccttcatttccctaactgaaatacacccactctcttggaataatgacgtaccactcagttggaccctcaagagtcactgctttgtctgtgctggtagtttgtgagaagtgacccgcacgcttccatttgatgcatttgatgtgagtgaatccatacatttgaatgtcattgtccttgagaccctacatgtgcagtttggctcatctcattaaagatgcttgatgtaataattggttagtttccttttattttcctgcaggcttttccatgagtattatttttttcaaagaacaaatctgtatggcttttccccatctccatattttgttttgctatgaattgctttgctttggtgaacttgtcctagtatgcttgcctcacaaacgttttagccattgtgaattttcttcatctctgtaaatagttcatctgtgcttctccctgatgacgttttattttttttcccctgtaagcaaccgaggtagaaaaataaattgtttaccatggaaaaaaaaa

SEQ ID NO: 478 - DNA, 445 bp, Homo sapiens
tcaagatgaatcgacatttaatataattaattaacatagtgctacaatatatttaattgtgcctcagaaatgatttaccaaagtttgattcctgtgtgctatttgaaatgacttgtagattttgttgtatcccctgatcttagaatcagaaatttgtgggtttcttcaacaataggtatcgcttgcattcaacagttttgcctcttcttcagaattattaatatttagatggaaatttgctcacagtcttttgtaacagtgcttgacatagaggaagggagagatgattgtgtccagtctgctcaggatccctggaagctcccccagtgagagacacctcactggtaaaaggaactctggagctacacacacctgggcacttggggaacttcctgcgcttcctacttaaactcaacttcagtcacgttacaaaaactcatgttca

SEQ ID NO: 479 - DNA, 508 bp, Homo sapiens
tattcattcttttggtcacctagggatcttctaagtgtgatattactttcagagaattcagacaagtgagaaacaataatgtaggagtcagcaaagcagaattcagagacttcagccaatcactgctgctctgagaggatccagttagagactcagtatcagcggtcagaacttatctcactcctgtgaactttcaggctggacttaaagctgccaagtttcccctgcaggaaggaaacactgcctcccttcagcaggtagctcattagaaagccaaacaggcaaacgatcctggcctctcccgccagctgaccgctcttcagcatccatgcggtttgtagtcgtgactttctcagtcacgatcaagggtgattttttcttaaatatcaagctgttctttgaacagggaatgaacatgagtttttgtaacgtgactgaagttgagtttaagtaggaagcgcaggaagttcccaagtgccaggtgtgtgtagctccagagttccttttt

SEQ ID NO: 480 - DNA, 3562 bp, Homo sapiens
gcggttgccatgaagacccggtccgggagcagtcgactgccggagactcgggaggctgagctttcctcggcctgagccagccagaccccgggcaccgcgctcacccctcttcgccgccacgtccgcgaaggcctcacgcgcgaggccaggcgaggccccgaggcgcccaccacttcacgacaccggagcgaaccgggcgccagaggctgcgacccccctgccccgaatcctgccggtgggagtggctgcatttgaaccaaacggccttcgcgggcagcagccgtcgccccgcagtcccggggctcccaagggcctgtgaccgacgccgccctccgcgtcttcgtccccgaagccccgggaaccatccgccctcgggagaccatgctgcagatgcgaggaaagccgtttcctggaacatcggaattctaaccccagggtgaaggactcacgacaggcgaggggcagacatgctgaattccacgggcgaactggagttttcgaacgaagaagatcccgagatcatctcccaactcacttccctgcctctgtccggtgggaaaagctcagctggtgtgcccgaaaaaacgggctatccggactccgtttatgtcatggcagccaacatttttcagggtattcgaatcgaaaagtcggcacagaaagtcttaatcaagtatgggaatgaacccctgcggtccttgtccgagtctgaggatcagtcctttcagcgtttgtcttatgagctggctttcagtgccctgaaatatcaagatattttggaaactatattgatagacagctgtatcttcccaagtaccacaataccagatcatttgagcagtcttattattgtgatgctatatgatttccaagatagaaaatttcaaactcgtgtcctttctgataatgaagagcccatatcagaagttcaagaagtagagaaccttcttaacagttttaagataaaattggctgcagcattggcaagatgtcgaatcaagcatgatgccctttcaatttaccacatccttccagaaacagttaggaaacaggaactaagggcctccactttaccactttatgcttggataaatacttgtaaaatcagccctgaagaagtttataataatttgaagagaagaggctataataaagtcaaatctgtattgcatattgatgataaagtctttgctgtggatcaacattgctatgatgtcttaatttttccatctcatcttaaaaatgatcttataaatatagatcttttcaaagattacaaacttatatttcaggacaaatctcgaagtcttgctgtccattctgtaaaggctttattaaatatggatgatgatgtcttaatggtcaatacaggttcatggtacacagttgcccacatgtcaattttaacaaataataatacctcaaaagtatttgtgtgtggagtacaatcacaagctaaggatcctgacttgaagacccttttcacaaaaataggatgtaaaaatattgaaatacttcatgagaaatttattaacattgaatcaaaggatcacaggttacagaaagttaaagtgattttgctgctacctcgttgttcaggactgggtgttagtaatccagtagaatttattttaaatgaacatgaagatacagaattccttaaagatcactctcaaggaggcatctcagtggacaaacttcacgttcttgctcaacagcagtatgaacagctaacacatgcaatgaaatttactaaagctcaagcagttgtttactgcacatgttcagtttttccagaagaaaatgaagctgttgttaagaaagcactggaatttcaagaccttgggaataaaggacaaccttacagcgggacccttctgagacagtgtctgtgaatgatgttttggcccgagctgcagccaagggtctgctggatgggattgagttgggtaaatcatcaaaacgggagaagaagaagaaaaaatcaaaaacatcattgacaaaaggtgccactactgataatggcatccaaatgaaaattgctgagttcctgaatcgagaaactaaagccagtgctaatctatcagagactgtaacaaaaccatctcttccccagaaaaatactgctcaagtgggggcttcctcacagaccagaaaacccaacaagctggccccccatcctgcagtgcctgcatttgtgaagaacgcttgtccctccagaccgcgtgaacggcagacacacttcttaagacctcggccagaagacagaatggttgctctgaaacccatcgagattgttctgcctccagtctttatgccattttcaagtccccaagggatcagatctcggatgccaactcaacatttgtactgtcgttgggttgcacccaaggcacttgtgcccacctgccttcccacacactcactatccagaaaagaggaaaagcctaaagatgacacaccttcctccctactcaggcctcctcggcgatggctttgattgtcttgtgttttttataggggccaaagagcagttgattttttttcaaagtctagtatttctctgaagattctacatctctacacaagatattcattcttttggtcacctagggatcttctaagtgtgatattactttcagagaattcagacaagtgagaaacaataatgtaggagtcagcaaagcagaattcagagacttcagccaatcactgctgctctgagaggatccagttagagactcagtatcagcggtcagaacttatctcactcctgtgaactttcaggctggacttaaagctgccaagtttcccctgcagggaaggaaacactgcctcccttcagcaggtagctcattagaaagccaaacaggcaaacgatcctggcctctcccgccagctgaccgctcttcagcatccatgcggttgtagtcgtgactttctcagtcacgatcaagggtgattttttcttaaatatcaagctgttctttgaacagggaatgaacatgagtttttgtaacgtgactgaagttgagtttaagtaggaagcgcaggaagttcccaagtgccaggtgtgtgtagctcagagttccttttacagtgaggtgtctctcactgggggagcttccaggatcctgagcagactggacacaatcatctctcccttcctctatgtcaagcactgttacaaaagactgtgagcaaatttccatctaaatattaataattctgaagaagaggcaaaactgttgaatgcaagcgatacctattgttgaagaaacccacaaattatttctgattctaagatcaggggatacaacaaaatctacaagtcatttcaaatagcacacaggaatcaaactttggtaaatcatttctgaggcacaattaaatatattgtagcactatgttaattaattatattaaatgtcgattcatcttgaatgtattctcaattgcctaccaaaaattggtatgattatcatttctgggtctactgatttttcatcatggcaacagaaattgtcattaaatagaattaagatacaaaaaaaaaaaaaaa

SEQ ID NO: 481 - DNA, 360 bp, Homo sapiens
atttacaaagatttattacagcacgggaggggttcaggcctggagttagggaagaaggggaaaggggcagagcagctgggggacaaggaaaacctggcgccccccgctgtgtgccccaccgggacaataaactaggcggcattcctggcatcaaagcacaaaacgcaacaaagaggtctctgccagtccatcttccaggcacccaggaggagcaagggtgattaagggaagattcccaaaatgttgaggctatggagaaaaacgccttagtcctggaccctggtagaagccggtgagagaagtggtgacttggaatcctccataggaaagtgggtagaaaaggatctaagggtacctcaa

SEQ ID NO: 482 - DNA, 352 bp, Homo sapiens
  modified_base (9)..(9): a, c, t or g
  modified_base (75)..(75): a, c, t or g
  modified_base (347)..(347): a, c, t or g
ccacaggcnaggaccctaagatctggggaaaggaggtcctgagaaccttgaggtacccttagatccttttctacncactttcctatggaggattccaagtcaccacttctctcaccggcttctaccagggtccaggactaaggcgtttttctccatagcctcaacattttgggaatcttcccttaatcacccttgctcctcctgggtgcctggaagatggactggcagagacctctttgttgcgttttgtgctttggatgccaggaatgccgcctagtttatgtccccggtgggcacacagcgggggggcgccaaggttttccttggtcccccaagctggctctgcnccttt

SEQ ID NO: 483 - DNA, 1841 bp, Homo sapiens
agctgggaccggagggtgagcccggcagaggcagagacacacgcggagaggaggagaggctgagggagggaggtggagaaggacgggagaggcagagagaggagacacgcagagacactcaggaggggagagacaccgagacgcagagacactcaggaggggagagacaccgagacgcagagacacccaggccggggagcgcgagggagcgaggcacagacctggctcagcgagcgcggggggcgagccccgagtcccgagagcctgggggcgcgcccagcccgggcgccgaccctcctcccgctcccgcgccctcccctcggcgggcacggtatttttatccgtgcgcgaacagccctcctcctcctctcgccgcacagcccgccgcctgcgcgggggagcccagcacagaccgccgccgggaccccgagtcgcgcaccccagccccaccgcccaccccgcgcgccatggaccccaaggaccgcaagaagatccagttctcggtgcccgcgccccctagccagctcgacccccgccaggtggagatgatccggcgcaggagaccaacgcctgccatgctgttccggctctcagagcactcctcaccagaggaggaagcctccccccaccagagagcctcaggagaggggcaccatctcaagtcgaagagacccaacccctgtgcctacacaccaccttcgctgaaagctgtgcagcgcattgctgagtctcacctgcagtctatcagcaatttgaatgagaaccaggcctcagaggaggaggatgagctgggggagcttcgggagctgggttatccaagagaggaagatgaggaggaagaggaggatgatgaagaagaggaagaagaagaggacagccaggctgaagtcctgaaggtcatcaggcagtctgctgggcaaaagacaacctgtggccagggtctggaagggccctgggagcgcccaccccctctggatgagtccgagagagatggaggctctgaggaccaagtggaagacccagcactaagtgagcctggggaggaacctcagcgcccttccccctctgagcctggcacataggcacccagcctgcatctcccaggaggaagtggaggggacatcgctgttccccagaaacccactctatcctcaccctgttttgtgctcttcccctcgcctgctagggctgcggcttctgacttctagaagactaaggctggtctgtgtttgcttgtttgcccacctttggctgatacccagagaacctgggcacttgctgcctgatgcccacccctgccagtcattcctccattcacccagcgggaggtgggatgtgagacagcccacattggaaaatccagaaaaccgggaacagggatttgcccttcacaattctactccccagatcctctcccctggacacaggagacccacagggcaggaccctaagatctggggaaaggaggtcctgagaaccttgaggtacccttagatccttttctacccactttcctatggaggattccaagtcaccacttctctcaccggcttctaccagggtccaggactaaggcgtttttctccatagcctcaacattttgggaatcttcccttaatcacccttgctcctcctgggtgcctggaagatggactggcagagacctctttgttgcgttttgtgctttgatgccaggaatgccgcctagtttatgtccccggtggggcacacagcggggggcgccaggttttccttgtcccccagctgctctgcccctttccccttcttccctgactccaggcctgaacccctcccgtgctgtaataaatctttgtaaataa

SEQ ID NO: 484 - DNA, 477 bp, Homo sapiens
  modified_base (102)..(102): a, c, t or g
  modified_base (415)..(415): a, c, t or g
  modified_base (434)..(434): a, c, t or g
  modified_base (461)..(461): a, c, t or g
tgcaggctcaacgtcctgcgtgaatgcagcagccacccccgtcttggcccaggtcctgggggctgctgaacccagcaccagtgtccccttgtgcccaggggnccagtcttctgtggggtgcacagcctccctccctccagcaagccctccctgcccagaaggaatgggtccaggtgtggattcccagggagggggttcattggctcagcttgggtcagggcagagctgttacctgaagagaggtgagaccaaggccacagggagctccaccttctctggtcttcagtccagcactgggtgccatccccatctctaaaaccagtaaatcagccagcgaatacccggaagcaagatgcacaggcgggcggcttcccacacacccgtcacaagacgcggacatgcaggtccggcgcgngtcttgccccgtccaaganctctccgtgtcgccagtgtgagctggnagatgaccaagatagt

SEQ ID NO: 485 - DNA, 2384 bp, Homo sapiens
gccatggccgccggccccgcgccgccccccggccgcccccgggcgcagatgccgcatctgaggaaggtgcgaggcggatggagcgggtggtcgtgagcatgcaggaccccgaccagggcgtgaagatgcggagccagcgcctgctggtcaccgtcattccccacgcggtgacaggcagcgacgtcgtgcagtggttggcccagaagttctgcgtctcggaggaggaggccctgcacctgggcgccgtcctggtgcagcatggctacatctacccgctgcgcgacccccgtagcctcatgctccggccagacgagacgccctacaggttccagaccccgtacttctggacaagtaccctgaggccggctgcagagctggactatgccatctacctggccaagaagaacatccgaaaacgggggaccctggtggattatgagaaggactgctatgaccggctacacaagaagatcaaccacgcatgggacctggtgctgatgcaggcgagggagcagctgagggcagccaagcagcgcagcaagggggacaggctggtcattgcgtgccaggagcagacctactggctggtgaacaggcccccgcccggggcccccgatgtgctggagcagggtccagggcggggatcctgcgctgccagccgtgtgctcatgaccaagagtgcagatttccataagcgggagatcgagtacttcaggaaagcgctgggcaggacccgagtgaagtcctccgtctgccttgaggcgtacctgagtttctgcggccagcgtggaccccacgatcccctcgtgtcggggtgcctgcccagcaatccctggatctcagacaatgacgcctactgggtcatgaatgcccccacggtggctgcccccacgaagctccgtgtggagagatggggcttcagcttccgggagctcctggaggaccccgtggggcgggcccacttcatggactttctgggaaaggagttcagtggagaaaacctcagcttctgggaggcatgtgaggagcttcgatatggagcgcaggcccaggtccccaccctggtggatgccgtgtacgagcagttcctggcccccggagctgcccactgggtcaacatcgacagccggaccatggagcagaccctggaggggctgcgccagccccaccgctatgtcctggatgacgcccagctgcacatatacatgctcatgaagaaggactcctacccaaggttcctgaagtctgacatgtacaaggccctcctggcagaggctgggatcccgctggagatgaagagacgcgtgttcccgtttacgtggaggccacggcactcgagccccagccctgcactccttcccacccctgtggagcccacagcggcttgtggccctgggggtggagatggggtggcctagtggacctggcccatctgccactctagtccctgcagctcaacgtcctgcgtgaatgcagcagccacccccgtcttggcccaggtcctgggggctgctgaacccagcaccagtgtccccttgtgcccagggggcccagtcttctgtggggtgcacagcctccctccctccagcaagccctccctgcccagaaggaatgggtccaggtgtggattcccagggagggggttcattggctcagcttgggtcagggcagagcctgttacctgaagagaggtgagaccaaggccacagggagctccaccttctctggtcttcagtccagcactgggtgcccatccccatctctaaaaccagtaaatcagccagcgaatacccggaagcaagatgcacaggcgggcggcttcccacacacccgtcacaagacgcggacatgcaggtctcggcgcgagctctgccccgtccaagagcctctccgctgtcgcccagtgtgagcctggaagaggacccaagagagtgccgtgctgaggctgcctcgaggtcactgccttccggagctgcgcctattcctccctcgccaaacgcgttccagaatttgtccacaggtgcgccggcacctgctttcccacctcgaggccgcggcctcccccccgatttatagacaactctgacattgtcaccccactgacgaggcccgattccatagggtggatccttgccaggcgtccctgatcctccctgcccaagtcttccttcgtgagctggccttgctccccatcccccaagtgcctcaccagtcccccagactgggtgaaggtacagctggctcctttcgggggtgcagcttcaactctctcggcggtagggcggtgccatccccacccatagggctggctcacatccagtcactcccaacagcgtccagcacacaaataaaagacccttgggccctggctctgagaaaaaaaa

SEQ ID NO: 486 - DNA, 585 bp, Homo sapiens
  modified_base (402)..(402): a, c, t or g
  modified_base (428)..(428): a, c, t or g
  modified_base (464)..(464): a, c, t or g
  modified_base (529)..(529): a, c, t or g
  modified_base (562)..(562): a, c, t or g
  modified_base (569)..(569): a, c, t or g
  modified_base (584)..(584): a, c, t or g
gtaggcagtatgattccaaaagttaaaaattatttcacaacctgtagcttcagcttggcaaacagcttagattccaaaactgattcatctctattaaaatgtaagcacttaaaaaaagagcatgtctgtgtatatagacatatattttaaaggaatcagataatctttgaagcagccttagtgtttcctttaaatttgtctggaaatgaccattgtattagcttcacagaaaggactagccagcttcttcgtctaaggctaacatggtgatcatttgtctaaggctagaaaggtaccaacaagatgtaaactgaggagagaaagagaagatgagggcttttcctggccgttggtagctaaaactgaagggattctagaaaatgacacaatggcagcctttcntgtctttttctttccgtgttggttcnggtgaaggaggacattcctggccctggaaatttccnggataacccggacaagttcatgggaaagcttgatctacattcatcctaatccttgccggatgccnccatgtatgttacctaagctgccggcaacggtngcctctnccggggtaccggccng

SEQ ID NO: 487 - DNA, 451 bp, Homo sapiens
  modified_base (355)..(355): a, c, t or g
  modified_base (395)..(395): a, c, t or g
gattcttacacaaagcagtgtgtgatagatgacagagcagcccggctagatattttggatacagcaggacaagaagagtttggagccatgagagaacagtatatgaggactggcgaaggcttcctgttggtcttttcagtcacagatagaggcagttttgaagaaatctataagtttcaaagacagattctcagagtaaaggatcgtgatgagttcccaatgattttaattggtaataaagcagatctggatcatcaaagacaggtaacacaggaagaaggacaacagttagcacggcagcttaaggtaacatacatggaggcatcagcaaagattaggatgaatgtagatcaantttccatgaacttgtccgggttatcaggaaatttcaagancaggaatgtcctcttcacagaccacacggaaagaaaagccagaaagctgcattgtg

SEQ ID NO: 488 - DNA, 2697 bp, Homo sapiens
acgcgcctgtgttgccgcccgcggccctggcttcgggcttcagggagctctggtgcagtctccgcctgtcagtgccggcagtcgtccgcggcgcccgccccggtcccgcactggtgcagccatgtcctcttccccgtgggagcctgcgaccctgcgccgggtgttcgtggtgggggttggcatgaccaagtttgtgaagcctggagctgagaattcaagagactaccctgacttggcagaagaagcaggcaagaaggctttagctgatgcacagatcccttattcagcagtggaccaggcatgtgttggctatgtttttggtgactctacctgtgggcagagggctatctatcacagtttgggaatgactggaattcctataatcaatgtcaacaataactgtgctactggttctactgctttgtttatggcccgccagctgattcagggtggtgtggcagaatgtgtcttggctcttgggtttgagaagatgagtaagggaagccttggaataaaattttcagatagaaccattcccactgataagcatgttgacctcctgatcaataagtatggattgtctgctcacccagttgctcctcagatgtttgggtatgctggaaaagaacatatggaaaaatatggaacaaaaattgaacactttgcaaaaattggatggaaaaatcataaacattcagttaataacccgtattcccagttccaagatgaatacagtttagatgaagtgatggcatctaaagaagtttttgattttttgactatcttacaatgttgtcccacttcagatggtgctgcagcagcaattttggccagtgaagcatttgtacagaagtatggcctgcaatccaaagctgtggaaattttggcacaagaaatgatgactgatttgccaagctcgtttgaagaaaaaagcattattaaaatggttggctttgatatgagtaaagaagctgcaagaaaatgctatgagaaatctggcctgacaccaaatgatattgacgtaatagaacttcacgattgcttttctaccaacgaactccttacttatgaagcactgggactctgtccagaaggacaaggtgcaacgctggttgatagaggagataatacatatggaggaaagtgggtcataaatcctagtggtggactgatttcaaagggacacccactaggcgctacaggtcttgctcagtgtgcagaactctgctggcagctgagaggggaagccggaaagaggcaagttcctggtgcaaaggtggctctgcagcataatttaggcattggaggagctgtggttgtaacactctacaagatgggttttccggaagccgccagttcttttagaactcatcaaattgaagctgttccaaccagctctgcaagtgatggatttaaggcaaatcttgtttttaaggagattgagaagaaacttgaagaggaaggggaacagtttgtgaagaaaatcggtggtatttttgccttcaaggtgaaagatggccctgggggtaaagaggccacctgggtggtggatgtgaagaatggcaaaggatcagtgcttcctaactcagataagaaggctgactgcacaatcacaatggctgactcagacttcctggctttaatgactggtaaaatgaatcctcagtcggccttctttcaaggcaaattgaaaatcactggcaacatgggtctcgctatgaagttacaaaatcttcagcttcagccaggcaacgctaagctctgaagaactccctttggctacttttgaaaatcaagatgagatatatagatatatatccatacattttattgtcagaatttagactgaaactacacattggcaaatagcgtgggatagatttgtttcttaatgggtgtgaccaatcctgtttttcctatgctctgggtgaatagagcctgatggtatactactgctttgcggaattgcatacaactgtgcattacaaagttaatatggtaattatggtctggggtaaaattgagtttcagaataaaattaggaacagtaaaatccaaagaactatgtaaacaaaaaagcttttgttttgcttacaaagtatatttaaggattattctgctgaagattcagtttaagagttttccttgggagaactaagtaagaaacacaatgccaacagctggccagtaattagtgttgtgcacttcatgtcattaatcaatttctcaatagttcttaaaattagtgagattaaaaatctaaaaattttgcatttcatgctatcagaaacagtattttcttcccaaatcaaaataaaagaaatatgatcagagcttgaacacaggcttatttttaaaataaaaatatttttaacatgggtttccttattgaaaaatcagtgtattagtcataaaacaccatcattaagaataattgaacaataaagtttgctttcagatgcagttttcaaattataatctcatttcaatttataacgttctcagtcctttgttataattttcctttttcatgtaagtttaattatctgcatttatcttttttcctagtttttctaatactaatgttatttcttaaaattcagtgagatataggataaaataatgctttgagaagaatgtttaatagaaaattaaaataactttttctggcaaaaaaaaaaaaaaaaaaaaaaaaaa

SEQ ID NO: 489 - DNA, 336 bp, Homo sapiens
gaaggccaaggatagattttattaggattctatctcttcttagagcccacagtacagtagtcttacaggctcatgaagaacactttttaatccatagcccaagaccaagtaactgcaatgaaacggacaaactatcacagttaaagatgtgctagaacaatgaaattttaacaaaacacggaaatcaagttaacttcataaacagttaaatcccaaaccaattcttatgctagtaagtgccctgcattatcattaagaactgagaaagacttactgtccaaagtatttgttaattgtttatttatcaagaggaactatttcttagccccacatatt

SEQ ID NO: 490 - DNA, 145 bp, Homo sapiens
  modified_base (17)..(17): a, c, t or g
tcgtgctatccctgggngttgcagctttgtataagtttcgtgtggctgatcaaagaaagaaggcatacgcagatttctacagaaactacgatgtcatgaaagattttgaggagatgaggaaggctggtatctttcagagtgtaaa

SEQ ID NO: 491 - DNA, 444 bp, Homo sapiens
ctttagtcaggaaggacgttggtgttgaggttagcatacgtatcaaggacagtaactaccatggctcccgaagttttgccaaaacctcggatgcgtggccttctggccaggcgtctgcgaaatcatatggctgtagcattcgtgctatccctgggggttgcagctttgtataagtttcgtgtggctgatcaaagaaagaaggcatacgcagatttctacagaaactacgatgtcatgaaagattttgaggagatgaggaaggctggtatctttcagagtgtaaagtaatcttggaatataaagaatttcttcaggttgaattacctagaagtttgtcactgacttgtgttcctgaactatgacacatgaatatgtgggctaagaaatagttcctcttgataaataaacaattaacaaatactttgaaaaaaaaaaaaaaaaaaa

SEQ ID NO: 492 - DNA, 322 bp, Homo sapiens
  modified_base (141)..(141): a, c, t or g
  modified_base (210)..(210): a, c, t or g
  modified_base (215)..(215): a, c, t or g
  modified_base (252)..(252): a, c, t or g
  modified_base (262)..(262): a, c, t or g
  modified_base (277)..(277): a, c, t or g
  modified_base (291)..(291): a, c, t or g
  modified_base (298)..(298): a, c, t or g
  modified_base (306)..(306): a, c, t or g
  modified_base (321)..(321): a, c, t or g
ttttttttttttgaggtcataaagaactttaataattcagagaagaagttcaaagtgtatttaaaagttgagaccctgctttacaatattttataattttaaaaaaaggcgtttaaaggtgataggtgacttaataatttnccactttcaaaatgggtttctagacactgttgttcatgacccaaaaacaaacaaacaaacaaacaacancaaancccaaacactttgggcaaggcaaagtattattaggtncataggcagncttcataacagtttncttttttcatatanggctttnccaatttncacttgtagggggtng

SEQ ID NO: 493 - DNA, 316 bp, Homo sapiens
  modified_base (257)..(257): a, c, t or g
  modified_base (287)..(287): a, c, t or g
  modified_base (302)..(302): a, c, t or g
actctgaaggttatattgggagtgcccatattcagggagtgcctataatcaggccttaggtgctcttgcagagaagttgcccacactcagtgggtgtcctataccatcaggttacccaggccgcacactacctgtataaaacacctgttggaaacaccatcctttaccaagtgtaattagtgtaagttaggcatcaattaaccaaactggggataattttcctctgttttatttgggagatggcacctcactaagtnggctgtgggattaggcatcccttaaaaggntggtttaaagggtanttcattttactggg

SEQ ID NO: 494 - DNA, 4786 bp, Homo sapiens
ctcggcgctgaaattcaaatttgaacggctgcagaggccgagtccgtcactggaagccgagaggagaggacagctggttgtgggagagttcccccgcctcagactcctggttttttccaggagacacactgagctgagactcacttttctcttcctgaatttgaaccaccgtttccatcgtctcgtagtccgacgcctggggcgatggatccgtttacggagaaactgctggagcgaacccgtgccaggcgagagaatcttcagagaaaaatggctgagaggcccacagcagctccaaggtctatgactcatgctaagcgagctagacagccactttcagaagcaagtaaccagcagcccctctctggtggtgaagagaaatcttgtacaaaaccatcgccatcaaaaaaacgctgttctgacaacactgaagtagaagtttctaacttggaaaataaacaaccagttgagtcgacatctgcaaaatcttgttctccaagtcctgtgtctcctcaggtgcagccacaagcagcagataccatcagtgattctgttgctgtcccggcatcactgctgggcatgaggagagggctgaactcaagattggaagcaactgcagcctcctcagttaaaacacgtatgcaaaaacttgcagagcaacggcgccgttgggataatgatgatatgacagatgacattcctgaaagctcactcttctcaccaatgccatcagaggaaaaggctgcttcccctcccagacctctgctttcaaatgcctcggcaactccagttggcagaaggggccgtctggccaatcttgctgcaactatttgctcctgggaagatgatgtaaatcactcatttgcaaaacaaaacagtgtacaagaacagcctggtaccgcttgtttatccaaattttcctctgcaagtggagcatctgctaggatcaatagcagcagtgttaagcaggaagctacattctgttcccaaagggatggcgatgcctctttgaataaagccctatcctcaagtgctgatgatgcgtctttggttaatgcctcaatttccagctctgtgaaagctacttctccagtgaaatctactacatctatcactgatgctaaaagttgtgagggacaaaatcctgagctacttccaaaaactcctattagtcctctgaaaacgggggtatcgaaaccaattgtgaagtcaactttatcccagacagttccatccaagggagaattaagtagagaaatttgtctgcaatctcaatctaaagacaaatctacgacaccaggaggaacaggaattaagcctttcctggaacgctttggagagcgttgtcaagaacatagcaaagaaagtccagctcgtagcacaccccacagaacccccattattactccaaatacaaaggccatccaagaaagattattcaagcaagacacatcttcatctactacccatttagcacaacagctcaagcaggaacgtcaaaaagaactagcatgtcttcgtggccgatttgacaagggcaatatatggagtgcagaaaaaggcggaaactcaaaaagcaaacaactagaaaccaaacaggaaactcactgtcagagcactcccctcaaaaaacaccaaggtgtttcaaaaactcagtcacttccagtaacagaaaaggtgaccgaaaaccagataccagccaaaaattctagtacagaacctaaaggtttcactgaatgcgaaatgacgaaatctagccctttgaaaataacattgtttttagaagaggacaaatccttaaaagtaacatcagacccaaaggttgagcagaaaattgaagtgatacgtgaaattgagatgagtgtggatgatgatgatatcaatagttcgaaagtaattaatgacctcttcagtgatgtcctagaggaaggtgaactagatatggagaagagccaagaggagatggatcaagcattagcagaaagcagcgaagaacaggaagatgcactgaatatctcctcaatgtctttacttgcaccattggcacaaacagttggtgtggtaagtccagagagtttagtgtccacacctagactggaattgaaagacaccagcagaagtgatgaaagtccaaaaccaggaaaattccaaagaactcgtgtccctcgagctgaatctggtgatagccttggttctgaagatcgtgatcttctttacagcattgatgcatatagatctcaaagattcaaagaaacagaacgtccatcaataaagcaggtgattgttcggaaggaagatgttacttcaaaactggatgaaaaaaataatgcctttccttgtcaagttaatatcaaacagaaaatgcaggaactcaataacgaaataaatatgcaacagacagtgatctatcaagctagccaggctcttaactgctgtgttgatgaagaacatggaaaagggtccctagaagaagctgaagcagaaagacttcttctaattgcaactgggaagagaacacttttgattgatgaattgaataaattgaagaacgaaggacctcagaggaagaataaggctagtccccaaagtgaatttatgccatccaaaggatcagttactttgtcagaaatccgcttgcctctaaaagcagattttgtctgcagtacggttcagaaaccagatgcagcaaattactattacttaattatactaaaagcaggagctgaaaatatggtagccacaccattagcaagtacttcaaactctcttaacggtgatgctctgacattcactactacatttactctgcaagatgtatccaatgactttgaaataaatattgaagtttacagcttggtgcaaaagaaagatccctcaggccttgataagaagaaaaaaacatccaagtccaaggctattactccaaagcgactcctcacatctataaccacaaaaagcaacattcattcttcagtcatggccagtccaggaggtcttagtgctgtgcgaaccagcaacttcgcccttgttggatcttacacattatcattgtcttcagtaggaaatactaagtttgttctggacaaggtcccctttttatcttctttggaaggtcatatttatttaaaaataaaatgtcaagtgaattccagtgttgaagaaagaggttttctaaccatatttgaagatgttagtggttttggtgcctggcatcgaagatggtgtgttctttctggaaactgtatatcttattggacttatccagatgatgagaaacgcaagaatcccataggaaggataaatctggctaattgtaccagtcgtcagatagaaccagccaacagagaattttgtgcaagacgcaacacttttgaattaattactgtccgaccacaaagagaagatgaccgagagactcttgtcagccaatgcagggacacactctgtgttaccaagaactggctgtctgcagatactaaagaagagcgggatctctggatgcaaaaactcaatcaagttcttgttgatattcgcctctggcaacctgatgcttgctacaaacctattggaaagccttaaaccgggaaatttccatgctatctagaggtttttgatgtcatcttaagaaacacacttaagagcatcagatttactgattgcattttatgctttaagtacgaaagggtttgtgccaatattcactacgtattatgcagtatttatatcttttgtatgtaaaactttaactgatttctgtcattcatcaatgagtagaagtaaatacattatagttgattttgctaaatcttaatttaaaagcctcattttcctagaaatctaattattcagttattcatgacaatatttttttaaaagtaagaaattctgagttgtcttcttggagctgtaggtcttgaagcagcaacgtctttcaggggttggagacagaaacccattctccaatctcagtagttttttcgaaaggctgtgatcatttattgatcgtgatatgacttgttactagggtactgaaaaaaatgtctaaggcctttacagaaacatttttagtaatgaggatgagaactttttcaaatagcaaatatatattggcttaaagcatgaggctgtcttcagaaaagtgatgtggacataggaggcaatgtgtgagacttgggggttcaatattttatatagaagagttaataagcacatggtttacatttactcagctactatatatgcagtgtggtgcacattttcacagaattctggcttcattaagatcattatttttgctgcgtagcttacagacttagcatattagttttttctactcctacaagtgtaaattgaaaaatctttatattaaaaaagtaaactgttatgaagctgctatgtactaataatactttgcttgccaaagtgtttgggttttgttgttgtttgtttgtttgtttgtttttggttcatgaacaacagtgtctagaaacccattttgaaagtggaaaattattaagtcacctatcacctttaaacgcctttttttaaaattataaaatattgtaaagcagggtctcaacttttaaatacactttgaacttcttctctgaattattaaagttctttatgacctcatttataaacactaaattctgtcacctcctgtcattttattttttattcattcaaatgtattttttcttgtgcatattataaaaatatattttatgagctcttactcaaataaatacctgtaaatgtctaaaggaaaaaaaaaaaaaaaaaa

SEQ ID NO: 495 - DNA, 475 bp, Homo sapiens
aacagaaccataagatttttatttaacatttttgattaaaggaattgtattgcaaattatgactttttaatttggcaacatccttttaatggtgttctttctttgtccttctctttctcttcctctctctctccctctcttccctaaagctccattccgacttagacaagggagagggcactgcgaaatacaccctctcaggagatggcgctggcaccgtttttaccattgatgaaaccacaggggacattcatgcaataaggagcctagatagagaagaaaaacctttctacactcttcggtgctcaggctgtggacatagaaaccagaaagcccctggagcctgaatcagaattccatcatcaaagtgcaggatatttaatgataatgagccaaagttttggggatgggaccttatggttgctactggtccccagaaatggtcccctgtggggtgagtagggcaaatccaaat

SEQ ID NO: 496 - DNA, 313 bp, Homo sapiens
  modified_base (18)..(18): a, c, t or g
  modified_base (207)..(207): a, c, t or g
  modified_base (210)..(210): a, c, t or g
  modified_base (213)..(213): a, c, t or g
  modified_base (218)..(218): a, c, t or g
  modified_base (236)..(236): a, c, t or g
  modified_base (244)..(244): a, c, t or g
  modified_base (248)..(248): a, c, t or g
  modified_base (252)..(252): a, c, t or g
  modified_base (261)..(261): a, c, t or g
  modified_base (266)..(266): a, c, t or g
  modified_base (299)..(299): a, c, t or g
  modified_base (307)..(307): a, c, t or g
gtattttctagaattganaaataattcttttagatgatagataagatgtttacatcaacctgcaaaaagtcaatgttgaagaggtctcattgtatctcacagaattttgatttgcctactcacccacaggagacatttctgggacagtagcaacataaggtccatcccaaaactttggctcattatcattaatatcctgcactttgntgntgnattcngattcaggctccaggggntttctggnttcnatgnccacagccngagcncgaagagtgttgaaaggtttttcttctctaacnaggctccntattgg

SEQ ID NO: 497 - DNA, 470 bp, Homo sapiens
  modified_base (327)..(327): a, c, t or g
tctactaagtctttcggatgccagcatatattttatacatatggcctatcttgattggggctagctagccacgcttcccgggctcaagagccacatctggctggtagctaccatagcagacagtgcaggactagaagcatttcaagatcctggcctggaagagtttctgtgtggtaagggaaactgacactttacatactgtcatcacttcccatgcttgaattgggattgcagagtatggagccaaggaacggtgctaggaaaggagtatcaggaagcacagagtttccttgaaatgttcctactgctttctctacatgtggcctngcagtgtgtataaattgaaagttgcaagcaatgaatccatacgtgtacatgggggatatgtgtaaacacctatgggacccacatatctataagttccacagctgatattcattctgtcacctgttcaagataacagtaaggaa

SEQ ID NO: 498 - DNA, 6222 bp, Homo sapiens
ggggggtgggcgccagcgccccggcgaacggcaaagagggagccgctcccgctcggggggccgctggagtgcccagcgggaacccgaaagtttgtaagaggaagagagcgcgcggcgagcgagcgagcgggccgggggcagcggcagcggcgccggggaccatggtgctgccggcgcctcctccgcgggcgtgaaggcggcgctcctactccctccccggactccgcggtgtcccagaagcttttgttgacaattccagtttccgaacaaaacatttcggcaatggtgagggcttcgatcccttctctgatttgctgtcagccatgaacggatggatgtgatgcctgctagccaaaaggcttccctctgtgtgttgcagtcctgtggcattatgcatgccccctcccagtgaccccaggctttttatggctgtgagacacgttaaaatttcaggggtaagacgtgaccttttgaggtgactataactgaagattgctttacagaagccaaaaaaggtttttgagtcatgatgcaagaatctgggactgagacaaaaagtaacggttcagccatccagaatgggtcgggcggcagcaaccacttactagagtgcggcggtcttcgggaggggcggtccaacggagagacgccggccgtggacatcggggcagctgacctcgcccacgcccagcagcagcagcaacaggcacttcaggtggcaagacagctccttcttcagcagcaacagcagcagcaagttagtggattaaaatctcccaagaggaatgacaaacaaccagctcttcaggttcccgtgtcagtggctatgatgacacctcaagttatcactccccagcaaatgcagcagatcctccagcaacaagtgctgagccctcagcagctccaggttctcctccagcagcagcaggccctcatgcttcaacagcagcagcttcaagagttttataaaaaacaacaggaacagttgcagcttcaacttttacaacaacaacatgctggaaaacagcctaaagagcaacagcaggtggctacccagcagttggcttttcagcagcagcttttacagatgcagcagttacagcagcagcacctcctgtctttgcagcgccaaggccttctgacaattcagcccgggcagcctgcccttccccttcaacctcttgctcaaggcatgattccaacagaactgcagcagctctggaaagaagtgacaagtgctcatactgcagaagaaaccacaggcaacaatcacagcagtttggatctgaccacgacatgtgtctcctcctctgcaccttccaagacctccttaataatgaacccacatgcctctaccaatggacagctctcagtccacactcccaaaagggaaagtttgtcccatgaggagcacccccatagccatcctctctatggacatggtgtatgcaagtggccaggctgtgaagcagtgtgcgaagatttccaatcatttctaaaacatctcaacagtgagcatgcgctggacgatagaagtacagcccaatgtagagtacaaatgcaggttgtacagcagttagagctacagcttgcaaaagacaaagaacgcctgcaagccatgatgacccacctgcatgtgaagtctacagaacccaaagccgcccctcagcccttgaatctggtatcaagtgtcactctctccaagtccgcatcggaggcttctccacagagcttacctcatactccaacgaccccaaccgcccccctgactcccgtcacccaaggcccctctgtcatcacaaccaccagcatgcacacggtgggacccatccgcaggcggtactcagacaaatacaacgtgcccatttcgtcagcagatattgcgcagaaccaagaattttataagaacgcagaagttagaccaccatttacatatgcatctttaattaggcaggccattctcgaatctccagaaaagcagctaacactaaatgagatctataactggttcacacgaatgtttgcttacttccgacgcaacgcggccacgtggaagaatgcagtgcgtcataatcttagtcttcacaagtgttttgtgcgagtagaaaacgttaaaggggcagtatggacagtggatgaagtagaattccaaaaacgaaggccacaaaagatcagtggtaacccttcccttattaaaaacatgcagagcagccacgcctactgcacacctctcaatgcagctttacaggcttcaatggctgagaatagtatacctctatacactaccgcttccatgggaaatcccactctgggcaacttagccagcgcaatacgggaagagctgaacggggcaatggagcataccaacagcaacgagagtgacagcagtccaggcagatctcctatgcaagccgtgcatcctgtacacgtcaaagaagagcccctcgatccagaggaagctgaagggcccctgtccttagtgacaacagccaaccacagtccagattttgaccatgacagagattacgaagatgaaccagtaaacgaggacatggagtgactatcggggcgggccaaccccgagaatgaagattggaaaaaggaaaaaaaaaaaaacacgtcaaaagttagcagtgaaattgttctccatttgttgtacagtctggaggattttcactacgttttgacaactctgaaatgtgttaactcttagtgccatcaagaaccccatttgggagtatttttgatttttctactttttgttgaaaaaaggaatttgtactctgtgcattggatggacttgtttggtacttgggattttcctctcttaaccgtcaacatcagtgttgtaaatttgctaaactgattcacttttagcagcagactttgaactgcagtcctgccaacgttggacactgaggacgcccgacagagcttgtgcacctaagctgcagaccaagcctttgcccagaatttaaggattccaatggacgacctatttgcacagtactgcatgttgattatcactgcctttactccttttttttttttttttttttttttttttttgcttccagttgggatggggaaggcctttgtgtgtgtattggggggaggggttaaaaaataattatcccaaactttttaatgtattgctttttttttttttttttttccttctactataccattttaagttctgacctcaggcctccatttgggccgatggcctcttggaggcttaaagttttctgtaccttgtgatgaatgttaataggtgtttttattatacaaagctgaatgtcatttctcgtttgtagctttctgtcactcattccatcttccttcagacatcaccacgtttctctaaagtcagaaaacattccgttttggtctttttcaaaaaggtcccaaatgctgcactctacacatgaaggccctctcacacagacgtgacgtcctgccagaaagagaatgaatgacagaaaaaaaaaagagagacaaactctaggaacaatgccgattcattccacgcagcagtattgggggtggttcgggggaggggtgtttcggattttctttttttcttttcttttctttttttttttttgcagcaaccattaataaatgccaccacattctaccagcacaaggaaacataggcagcactgaaaaaaaaaaaaaagctcatattaattagactgacaatatggccttggaaggctctcccttgtggaaccaagttgccatgggccttgggtgctctgcgataacgggtgtgggttggttttgtttgcaaaatggccaaaaaaaaaaaccggcttccccgagcagctgccctgaaagtaggggtggcggcggcggcgctgagtttatacattagttcagacctacttggtggcattaaactgtttgaatgcaaattcgatttcagattgaacttgttaagggagttaacgagggctgagttcagcaaatgctaaagtgttaatttcaaatatgcaaatttggtactgcagtttgttatgcaatattatatcaccaacccagtatcacaaaaactcatagaagatatcatgtaggccctgggctttgggggggtcccaaacatggtatgcagaaatgtgatggttacaggtcagtacaacctcagtccttagaacccctccacacttcagctctgcacccactttcctgtcatttatttatataggactgtagttttttttagttcgagagcctttcgaagcttaatttatattctttctttgtaccttttttctaaaattaccaaagatattacacaaaggtaaattatgttctctgttttatgctttatctgatgaagccaaatatcctcttattgttgatcaaaggaggcaaaagaatttagaggcaaatgacaagcgataggctattgcaacctgagaaagagaactgctccttcatcgtaaatttagaagaccaagtagataatggaaccaaagttgttacttttttctagtagttatttttcctttttctttttgtgtacctctacagagaccaaaactcattctcttaaagagattttatggggctactgcagataaaaataggacacaatattaaaggagctacagaaggaagggagtcccatctcaaaaaaaaaatgaatgtatgccactgcaattagagtatccaataaaggagacagtttagagtcaggacagaaaagcttccataattgaactagattacataatagtatttctagaaaaagagatatttttagattgtatgccacttttgtttaagaactgtgctgtgatcactgtattaattttggtttatcttggcatatatccttcagtttgtttttatttttaatttttcctttttttccgattaggctttggtcagcatttttcatttaaagaaaagtaacactcccatccactcataagcttggtacaaaaacttctctggcagttacttttgaagcttcactctgctttctgtataaagggcagtctgtggtcacgcaagactttaaaaaaaaaaaaaaaaaaaaaaaaaaaaaaaaaaaaaaaaacttttccaggcagcttcatgatgtgcaggcagtagccagacagggtcatgggaagggggccctgtgcttctaaactgagtggttgctggttagtttggtattcaaaagaggataaaaatctggtagattagttcattctcagcatgtgtagctagacatgagtaaagataacagcatgagaaactgttagtacgcatacctcagttcaaacctttagggaatgattaaaatttaaaaaaaaaacatttcactcagttgcacttagtcgtatgtcttgcatgcttagtctaaagactgtagcaaaaaaaaaaaaaaaagaaaaattagattttacatatctttgcaggtatcacagccttgcagaagaaccaactgaaaaaaaaattctcaggctttacagcaagcaaacttcactatgatttttacaattctgattctgtatcccctgggggttatcccagttgcttctttaggatggggtttattacgttgtacatatatcccgatgtgtctgtgtgaatctttgtcttttttgggggagggcagagggcggttctttttttagatattgttcctaaaaaggaataaatgcatacacctgtttgtcaaaacacctttgctttttgtgcaactgctttatattaacgatactaaaaaaaaatagctttggaaaaaaaactactgtatgtaacggaattgcagaatatgctgcacatgtattttatttagttatccttgctttaagaatattggatgacatttcctgacatgtgggagggagaaactccctaactttttttttctgcttttaaactgtaacatagttgaagatttcttttttctgttctcattgattggagcattttgtacaggttttgtgtgtgtgtgtgtgtgtgtgtgcgcgcgtgcgtgtgtgttaatctgttttttgatacattcctatcccttgtgtttatcctaccactgccttcctggctatcttaaacaagttcatacatttgaaaagaaaaaaaaatgttgtttaaaaaatgttttctcctgctgcagtaaatattttgcatgatgaaattccagggtcacacttttccaagtttatcagtgaagtagtgattaacaatggggagtgtcaaaactattgaacttttgta

SEQ ID NO: 499 - DNA, 489 bp, Homo sapiens
  modified_base (292)..(292): a, c, t or g
  modified_base (390)..(390): a, c, t or g
  modified_base (441)..(441): a, c, t or g
  modified_base (448)..(448): a, c, t or g
  modified_base (458)..(458): a, c, t or g
  modified_base (473)..(473): a, c, t or g
acagagaatataaaaatacattcactttattttagaaaaatgaagactcatagagtaagcttatcacaaactggcctattaggagtcacagaattcacaggaaacaatttctgaagaccaggtgcctgctgccacctctccaagcaggccagagtccagtagagaatgcgattcaggaagatggctcctcagagggcagggaggttagctacggaggccgctcacgtggaaatgtccagtgaaccaatgccaaggaagaagataaaattctctggggctgaccacaacagtngggggtggataaagacaaaccacttgcctgtacttctcatcttctatttgttcatttcactgctggaaggtgacctcttttcccctaatcttctttcnacccagagagtttaaagtcttctccagctcaatcctaatccaccccatttnccatggnctctactccnggggagaacaggccngggtgggatctcttcc

SEQ ID NO: 500 - DNA, 340 bp, Homo sapiens
actcgaaagggcttccaagtaccaagtcactgcaggacacagagtgcgggaaagtggacacaaggttcctgtttcccagcgactaaatcttcctgtcatgggtgccactcgcagcaatctgcagccccccaggaaagtggcagtcccaggacctaccaggtaaagagatcaggacagcaagcaagacttcagtagcaaaccactacagtcagtacctggactcgcctctacccagcagaccctgactccagcagattctggcccagggacaggaggaagagatgccaccagggctggtctcccaggagtagagaccatgggaaatggggtggattaggat

SEQ ID NO: 501 - DNA, 1720 bp, Homo sapiens
ctgattcccgggactaggttgcgggagaaagcctgttgcgtggaagataaggcggcgcgggaagtggacacagggtgggctggagatctaactggactctcgctcctgctggctggacatggaggatttggaggaagatgtaaggtttattgtggatgagaccttggactttggggggctgtcaccatctgacagccgtgaggaggaagacataacagtgttggtgactccagagaaaccacttcgacggggcctctcccaccgaagtgacccaaatgcagtggcacctgccccccagggtgtgaggctcagcctaggccccctcagtccagagaagctggaggagatcctcgatgaggccaaccggctggccgctcagctggagcagtgtgccctgcaggatcgggagagcgcaggcgagggcctggggcctcgccgagtgaagcccagtcctcggcgggagacctttgtgctgaaggatagtcctgtccgagacctgctgcccactgtgaactctttgacgcggagcaccccctccccaagcagcctgacgcctcgactccggagtaatgataggaaggggtcagtcagggctctccgggctacatctggaaagaggccctccaacatgaagagggagtcacccacttgcaatctgttccctgcatccaaaagcccagcatcttctcctcttacccgatcgactcccccagtccgggggagagccgggcccagtgggagagcagcagccagcccacccacccccatcagatccgtcctggccccacagccttctaccagcaactctcaacgcctgccccggccgcagggagcagctgctaaatcttccagtcaactgcccattccctcggccatccccaggcctgccagccgaatgccactcaccagccggagtgtgccacctggcagaggtgccctacctccggattctctgtcaactcgaaaagggcttccaagaccaagcactgcaggacacagagtgcgggaaagtggacacaaggttcctgtttcccagcgactaaatcttcctgtcatgggtgccactcgcagcaatctgcagccccccaggaaagtggcagtcccaggacctaccaggtaaagagatcaggacagcaagcaagacttcagtagcaaaccactacagtcagtacctggactcgcctctacccagcagaccctgactccagcagattctggcccagggacaggaggaagagatgccaccagggctggtctcccaggagtagagaccatgggaaatggggtggattaggattgagctggagaagacttaaactctctgggttgaaagaagattaggggaaaagaggtcaccttccagcagtgaaatgaacaaatagaagatgagaagtacaggcaagtggtttgtctttatccacccccactgttgtggtcagccccagagaattttatcttcttccttggcattggttcactggacatttccacgtgagcggcctccgtagctaacctccctgccctctgaggagccatcttcctgaatcgcattctctactggactctggcctgcttggagaggtggcagcaggcacctggtcttcagaaattgtttcctgtgaattctgtgactcctaataggccagtttgtgataagcttactctatgagtcttcatttttctaaaataaagtgaatgtatttttatattctctgtaaaa

SEQ ID NO: 502 - DNA, 166 bp, Homo sapiens
  modified_base (30)..(30): a, c, t or g
ttacctgtaagtgtctgactcagaagggcntaggcattctttttatgtcatgggtttgatttctttcttcctttctcctttcattcccctggctcccatcttcaaagtgaaaaatatcacattcacttgctgacctagagccttgttctttttccagggctggctt

SEQ ID NO: 503 - DNA, 514 bp, Homo sapiens
  modified_base (483)..(483): a, c, t or g
  modified_base (497)..(497): a, c, t or g
  modified_base (513)..(513): a, c, t or g
tagcaaaggtaccatttttcacaggctattttctactttcataatcatctcataaaggcagtataggttcaaaaggcaaatttttaggagacaacctgatcagccaccaagaatcgtttttgatttggtatcaaaagacataacatttgatcagtttgcaattttgtttgggataaatatccacagtgatactttgactctgaaaaaacatcaaagtgccgctttgggggagatcatgaaaacacagcatgcaggcctaagagttgctaggaaggctacgacagacgggacagcagcaggttctctctcaagactagacccgtcaacagagcatgcagagaaagaggcacagaggctgttgcttcacaaaactgaggacggtcaggatcagccaccaccacttcctggatgtttctggcatagttcccaagtccagcattaaccaaggtccattctgtctaaaatgcacgaaaagcccagctnctgcacagcacagncacagcattaaaatant

SEQ ID NO: 504 - DNA, 4989 bp, Homo sapiens
ttttttttttttttgagaaagggaatttcatcccaaataaaaggaatgaagtctggctccggaggagggtccccgacctcgctgtgggggctcctgtttctctccgccgcgctctcgctctggccgacgagtggagaaatctgcgggccaggcatcgacatccgcaacgactatcagcagctgaagcgcctggagaactgcacggtgatcgagggctacctccacatcctgctcatctccaaggccgaggactaccgcagctaccgcttccccaagctcacggtcattaccgagtacttgctgctgttccgagtggctggcctcgagagcctcggagacctcttccccaacctcacggtcatccgcggctggaaactcttctacaactacgccctggtcatcttcgagatgaccaatctcaaggatattgggctttacaacctgaggaacattactcggggggccatcaggattgagaaaaatgctgacctctgttacctctccactgtggactggtccctgatcctggatgcggtgtccaataactacattgtggggaataagcccccaaaggaatgtggggacctgtgtccagggaccatggaggagaagccgatgtgtgagaagaccaccatcaacaatgagtacaactaccgctgctggaccacaaaccgctgccagaaaatgtgcccaagcacgtgtgggaagcgggcgtgcaccgagaacaatgagtgctgccaccccgagtgcctgggcagctgcagcgcgcctgacaacgacacggcctgtgtagcttgccgccactactactatgccggtgtctgtgtgcctgcctgcccgcccaacacctacaggtttgagggctggcgctgtgtggaccgtgacttctgcgccaacatcctcagcgccgagagcagcgactccgaggggtttgtgatccacgacggcgagtgcatgcaggagtgcccctcgggcttcatccgcaacggcagccagagcatgtactgcatcccttgtgaaggtccttgcccgaaggtctgtgaggaagaaaagaaaacaaagaccattgattctgttacttctgctcagatgctccaaggatgcaccatcttcaagggcaatttgctcattaacatccgacgggggaataacattgcttcagagctggagaacttcatggggctcatcgaggtggtgacgggctacgtgaagatccgccattctcatgccttggtctccttgtccttcctaaaaaaccttcgcctcatcctaggagaggagcagctagaagggaattactccttctacgtcctcgacaaccagaacttgcagcaactgtgggactgggaccaccgcaacctgaccatcaaagcagggaaaatgtactttgctttcaatcccaaattatgtgtttccgaaatttaccgcatggaggaagtgacggggactaaagggcgccaaagcaaaggggacataaacaccaggaacaacggggagagagcctcctgtgaaagtgacgtcctgcatttcacctccaccaccacgtcgaagaatcgcatcatcataacctggcaccggtaccggccccctgactacagggatctcatcagcttcaccgtttactacaaggaagcaccctttaagaatgtcacagagtatgatgggcaggatgcctgcggctccaacagctggaacatggtggacgtggacctcccgcccaacaaggacgtggagcccggcatcttactacatgggctgaagccctggactcagtacgccgtttacgtcaaggctgtgaccctcaccatggtggagaacgaccatatccgtggggccaagagtgagatcttgtacattcgcaccaatgcttcagttccttccattcccttggacgttctttcagcatcgaactcctcttctcagttaatcgtgaagtggaaccctccctctctgcccaacggcaacctgagttactacattgtgcgctggcagcggcagcctcaggacggctacctttaccggcacaattactgctccaaagacaaaatccccatcaggaagtatgccgacggcaccatcgacattgaggaggtcacagagaaccccaagactgaggtgtgtggtggggagaaagggccttgctgcgcctgccccaaaactgaagccgagaagcaggccgagaaggaggaggctgaataccgcaaagtctttgagaatttcctgcacaactccatcttcgtgcccagacctgaaaggaagcggagagatgtcatgcaagtggccaacaccaccatgtccagccgaagcaggaacaccacggccgcagacacctacaacatcaccgacccggaagagctggagacagagtaccctttctttgagagcagagtggataacaaggagagaactgtcatttctaaccttcggcctttcacattgtaccgcatcgatatccacagctgcaaccacgaggctgagaagctgggctgcagcgcctccaacttcgtctttgcaaggactatgcccgcagaaggagcagatgacattcctgggccagtgacctgggagccaaggcctgaaaactccatctttttaaagtggccggaacctgagaatcccaatggattgattctaatgtatgaaataaaatacggatcacaagttgaggatcagcgagaatgtgtgtccagacaggaatacaggaagtatggaggggccaagctaaaccggctaaacccggggaactacacagcccggattcaggccacatctctctctgggaatgggtcgtggacagatcctgtgttcttctatgtccaggccaaaacaggatatgaaaacttcatccatctgatcatcgctctgcccgtcgctgtcctgttgatcgtgggagggttggtgattatgctgtacgtcttccatagaaagagaaataacagcaggctggggaatggagtgctgtatgcctctgtgaacccggagtacttcagcgctgctgatgtgtacgttcctgatgagtgggaggtggctcgggagaagatcaccatgagccgggaacttgggcaggggtcgtttgggatggtctatgaaggagttgccaagggtgtggtgaaagatgaacctgaaaccagagtggccattaaaacagtgaacgaggccgcaagcatgcgtgagaggattgagtttctcaacgaagcttctgtgatgaaggagttcaattgtcaccatgtggtgcgattgctgggtgtggtgtcccaaggccagccaacactggtcatcatggaactgatgacacggggcgatctcaaaagttatctccggtctctgaggccagaaatggagaataatccagtcctagcacctccaagcctgagcaagatgattcagatggccggagagattgcagacggcatggcatacctcaacgccaataagttcgtccacagagaccttgctgcccggaattgcatggtagccgaagatttcacagtcaaaatcggagattttggtatgacgcgagatatctatgagacagactattaccggaaaggaggcaaagggctgctgcccgtgcgctggatgtctcctgagtccctcaaggatggagtcttcaccacttactcggacgtctggtccttcggggtcgtcctctgggagatcgccacactggccgagcagccctaccagggcttgtccaacgagcaagtccttcgcttcgtcatggagggcggccttctggacaagccagacaactgtcctgacatgctgtttgaactgatgcgcatgtgctggcagtataaccccaagatgaggccttccttcctggagatcatcagcagcatcaaagaggagatggagcctggcttccgggaggtctccttctactacagcgaggagaacaagctgcccgagccggaggagctggacctggagccagagaacatggagagcgtccccctggacccctcggcctcctcgtcctccctgccactgcccgacagacactcaggacacaaggccgagaacggccccggccctggggtgctggtcctccgcgccagcttcgacgagagacagccttacgcccacatgaacgggggccgcaagaacgagcgggccttgccgctgccccagtcttcgacctgctgatccttggatcctgaatctgtgcaaacagtaacgtgtgcgcacgcgcagcggggtggggggggagagagagttttaacaatccattcacaagcctcctgtacctcagtggatcttcagttctgcccttgctgcccgcgggagacagcttctctgcagtaaaacacatttgggatgttccttttttcaatatgcaagcagctttttattccctgcccaaacccttaactgacatgggcctttaagaaccttaatgacaacacttaatagcaacagagcacttgagaaccagtctcctcactctgtccctgtccttccctgttctccctttctctctcctctctgcttcataacggaaaaataattgccacaagtccagctgggaagccctttttatcagtttgaggaagtggctgtccctgtggccccatccaaccactgtacacacccgcctgacaccgtgggtcattacaaaaaaacacgtggagatggaaatttttacctttatctttcacctttctagggacatgaaatttacaaagggccatcgttcatccaaggctgttaccattttaacgctgcctaattttgccaaaatcctgaactttctccctcatcggcccggcgctgattcctcgtgtccggaggcatgggtgagcatggcagctggttgctccatttgagagacacgctggcgacacactccgtccatccgactgcccctgctgtgctgctcaaggccacaggcacacaggtctcattgcttctgactagattattatttgggggaactggacacaataggtctttctctcagtgaaggtggggagaagctgaaccggc

SEQ ID NO: 505 - DNA, 485 bp, Homo sapiens
  modified_base (473)..(473): a, c, t or g
gaagttctataaaatatgtatttgctaaacattggaaacaagttaaatgtttatcaattgagtaatggcaagtaaattggggtacatgatcttgaaggaacatgacttattctctcattcattatacaaacatatagactgccaaagagctatcagatacacagcaatttaacagttaccacatctgacttcaatgaatacacagtctggtagagtcttctaaaatgataattaccaaactacatagaaagcgagcactatttgtggtctaacgttaagaggaaaacaaatcagattataaaaccatctgtacattacgattgcaactctaaacatgtgagagtgtgaacaaggtctggacgggtgaatacaggaatgacaatattggatgtggttagattggatgactttttctttagcattattacaattgttttcgagctttaaagttttagattgttccaaacgtttcnaggggggaaaaa

SEQ ID NO: 506 - DNA, 3108 bp, Homo sapiens
gaaatactcgtctctggtaaagtctgagcaggacagggtggctgactggcagatccagaggttcccttggcagtccacgccaggccttcaccatggatcagttccctgaatcagtgacagaaaactttgagtacgatgatttggctgaggcctgttatattggggacatcgtggtctttgggactgtgttcctgtccatattctactccgtcatctttgccattggcctggtgggaaatttgttggtagtgtttgccctcaccaacagcaagaagcccaagagtgtcaccgacatttacctcctgaacctggccttgtctgatctgctgtttgtagccactttgcccttctggactcactatttgataaatgaaaagggcctccacaatgccatgtgcaaattcactaccgccttcttcttcatcggcttttttggaagcatattcttcatcaccgtcatcagcattgataggtacctggccatcgtcctggccgccaactccatgaacaaccggaccgtgcagcatggcgtcaccatcagcctaggcgtctgggcagcagccattttggtggcagcaccccagttcatgttcacaaagcagaaagaaaatgaatgccttggtgactaccccgaggtcctccaggaaatctggcccgtgctccgcaatgtggaaacaaattttcttggcttcctactccccctgctcattatgagttattgctacttcagaatcatccagacgctgttttcctgcaagaaccacaagaaagccaaagccattaaactgatccttctggtggtcatcgtgtttttcctcttctggacaccctacaacgttatgattttcctggagacgcttaagctctatgacttctttcccagttgtgacatgaggaaggatctgaggctggccctcagtgtgactgagacggttgcatttagccattgttgcctgaatcctctcatctatgcatttgctggggagaagttcagaagatacctttaccacctgtatgggaaatgcctggctgtcctgtgtgggcgctcagtccacgttgatttctcctcatctgaatcacaaaggagcaggcatggaagtgttctgagcagcaattttacttaccacacgagtgatggagatgcattgctccttctctgaagggaatcccaaagccttgtgtctacagagaacctggagttcctgaacctgatgctgactagtgaggaaagatttttgttgttatttcttacaggcacaaaatgatggacccaatgcacacaaaacaaccctagagtgttgttgagaattgtgctcaaaatttgaagaatgaacaaattgaactctttgaatgacaaagagtagacatttctcttactgcaaatgtcatcagaactttttggtttgcagatgacaaaaattcaactcagactagtttagttaaatgagggtggtgaatattgttcatattgtggcacaagcaaaagggtgtctgagccctcaaagtgaggggaaaccagggcctgagccaagctagaattccctctctctgactctcaaatcttttagtcattatagatcccccagactttacatgacacagctttatcaccagagagggactgacacccatgtttctctggccccaagggcaaaattcccagggaagtgctctgataggccaagtttgtatcaggtgcccatccctggaaggtgctgttatccatggggaagggatatataagatggaagcttccagtccaatctcatggagaagcagaaatacatatttccaagaagttggatgggtgggtactattctgattacacaaaacaaatgccacacatcacccttaccatgtgcctgatccagcctctcccctgattacaccagcctcgtcttcattaagccctcttccatcatgtccccaaacctgcaagggctccccactgcctactgcatcgagtcaaaactcaaatgcttggcttctcatacgtccaccatggggtcctaccaatagattccccattgcctcctccttcccaaaggactccacccatcctatcagcctgtctcttccatatgacctcatgcatctccacctgctcccaggccagtaagggaaatagaaaaaccctgcccccaaataagaagggatggattccaaccccaactccagtagcttgggacaaatcaagcttcagtttcctggtctgtagaagagggataaggtacctttcacatagagatcatcctttccagcatgaggaactagccaccaactcttgcaggtctcaacccttttgtctgcctcttagacttctgctttccacacctggcactgctgtgctgtgcccaagttgtggtgctgacaaagcttggaagagcctgcaggtgctgctgcgtggcatagcccagacacagaagaggctggttcttacgatggcacccagtgagcactcccaagtctacagagtgatagccttccgtaacccaactctcctggactgccttgaatatcccctcccagtcaccttgtggcaagcccctgcccatctgggaaaataccccatcattcatgctactgccaacctggggagccagggctatgggagcagcttttttttcccccctagaaacgtttggaacaatctaaaagtttaaagctcgaaaacaattgtaataatgctaaagaaaaagtcatccaatctaaccacatcaatattgtcattcctgtattcacccgtccagaccttgttcacactctcacatgtttagagttgcaatcgtaatgtacagatggttttataatctgatttgttttcctcttaacgttagaccacaaatagtgctcgctttctatgtagtttggtaattatcattttagaagactctaccagactgtgtattcattgaagtcagatgtggtaactgttaaattgctgtgtatctgatagctctttggcagtctatatgtttgtataatgaatgagagaataagtcatgttccttcaagatcatgtaccccaatttacttgccattactcaattgataaacatttaacttgtttccaatgtttagcaaatacatattttatagaacttcca

SEQ ID NO: 507 - DNA, 575 bp, Homo sapiens
  modified_base (512)..(512): a, c, t or g
gacggtcttcaggtttatttcttaaatcaattaggaaataaaaccacagtgcccaggaaagttcacatgagacgccacggtgtctcttgccatggccccaccactccaggggccagggggtgctgctggagggaggacagacggacaggcggcctgggttggcggccccagaaaggctggcgtggatgttcgagatgagccaccagcgaaccagtagggatgtctgggccgtcctggtgggattgtctgggacatcgccaccaacacggtgtcagagccatcagtggggacatcggaggggccaccaccaggtggggtatattcaacaggctagaacccctgaggcttgagaggccaacccccggcaggagacctcccctgacccctctgctgcctctcctgtgggaccctccagtagacacaccagatgaggacacccaggaggcctcctcccaggacaggaggcagctggctgggcagccacgcattcagggttcagggccctccagcangagctccatggagatggctaatggggacatcaagcaggggctacagtggtacatccagtggtc

SEQ ID NO: 508 - DNA, 3562 bp, Homo sapiens
ggggcggggctggagcggcccgcggcctcagctctctctgcttccccaggatgcgggctccgggtgcgggcgcggcctcggtggtctcgctggcgctgttgtggctgctggggctgccgtggacctggagcgcggcagcggcgctcggcgtgtacgtgggcagcggcggctggcgcttcctgcgcatcgtctgcaagaccgcgaggcgagacctcttcggtctctctgtgctgatccgcgtgcgcctggagctgcggcggcaccagcgtgccggccacaccatcccgcgcatctttcaggcggtagtgcagcgacagcccgagcgcctggcgctggtggatgccgggaccggcgagtgctggacctttgcgcagctggacgcctactccaatgcggtagccaacctcttccgccagctgggcttcgcgccgggcgacgtggtggccatcttcctggagggccggccggagttcgtggggctgtggctgggcctggccaaggcgggcatggaggccgcgctgctcaacgtgaacctgcggcgcgagcccctggccttctgcctgggcacctcgggcgctaaggccctgatctttggaggagaaatggtggcggcggtggccgaagtgagcgggcatctggggaaaagtttgatcaagttctgctctggagacttggggcccgagggcatcttgccggacacccacctcctggacccgctgctgaaggaggcctctactgcccccttggcacagatccccagcaagggcatggacgatcgtcttttctacatctacacgtcggggaccaccgggctgcccaaggctgccattgtcgtgcacagcaggtactaccgcatggcagccttcggccaccacgcctaccgcatgcaggcggctgacgtgctctatgactgcctgcccctgtaccactcggcaggaaacatcatcggcgtggggcagtgtctcatctatgggctgacagtcgtcctccgcaagaaattctcggccagccgcttctgggacgactgcatcaagtacaactgcacggtggttcagtacatcggggagatctgccgctacctgctgaagcagccggtgcgcgaggcggagaggcgacaccgcgtgcgcctggcggtggggaacgggctgcgtcctgccatctgggaggagttcacggagcgcttcggcgtacgccaaatcggggagttctacggcgccaccgagtgcaactgcagcattgccaacatggacggcaaggtcggctcctgtggtttcaacagccgcatcctgccccacgtgtaccccatccggctggtgaaggtcaatgaggacacaatggagctgctgcgggatgcccagggcctctgcatcccctgccaggccggggagcctggcctccttgtgggtcagatcaaccaacaggacccgctgcgccgcttcgatggctatgtcagcgagagcgccaccagcaagaagatcgcccacagcgtcttcagcaagggcgacagcgcctacctctcaggtgacgtgctagtgatggatgagctgggctacatgtacttccgggaccgtagcggggacaccttccgctggcgaggggagaacgtctccaccaccgaggtggagggcgtgctgagccgcctgctgggccagacagacgtggccgtctatggggtggctgttccaggagtggagggtaaggcagggatggcggccgtcgcagacccccacagcctgctggaccccaacgcgatataccaggagctgcagaaggtgctggcaccctatgcccggcccatcttcctgcgcctcctgccccaggtggacaccacaggcaccttcaagatccagaagacgaggctgcagcgagagggctttgacccacgccagacctcagaccggctcttcttcctggacctgaagcagggccactacctgcccttaaatgaggcagtctacactcgcatctgctcgggcgccttcgccctctgaagctgttcctctactggccacaaactctgggcctggtgggagaggccagcttgagccagacagcgctgcccaggggtggccgcctagtacacacccacctggccgagctgtacctggcacggcccatcctggactgagaaactggaacctcagaggaacccgtgcctctctgctgccttggtgcccctgtgtctgcctcctctccctgcttttcagcctctgtctccttccatccctgtccctgtctggccttaactcttccctctttttcttttctttctttctttcttttttttttaagatagagtctcactctgctgcccgggctagagtgcagtggtgggatctcggctcactgcaacctctgcctcctggggttcaagtgatcctcccacctcagcctcctgagtagctgggattacaggcacccgccaccacgtccagctaatttttatatttttagtagagacggggtttcaccatgttggtcaggctggtcttgaactcctgacctcaggtgatccgctggcctcggcctcccagagtgctgggattataggcgtgagcctctggcccggcctttcctttttcctctcctctcctgccgagagtggaacacacgtgtcctgggagctgcatcttgtgtagggtccagctgcttttggggactgcaggaatcatctcccctgggccctggactcggactggggcctccccacctccctctcggctgtgccttacggagccccaatccaggcctcctgtggctgttgggttccagatgctgcagctccatgtgacttccaagcaggccctccgccctccctgctgaatggaggagccgggggtcccccaggccaactggaaaatctcccaggctaggccaattgccttttgcacttccccgttcctgtcacatttccccagccccaccttcccctcctgatgccctgaaagcttccggaattgactgtgaccacttggatgtcaccactgtcagcccctgccttgatgtccccatttagccatctccatggagctcctgctggagggccctgaaccctgcactgcgtggctgcccagccagctgcctcctgtcctgggaggaggcctcctgggtgtcctcatctggtgtgtctactggagggtcccacaggagaggcagcagaggggtcaggggaggtctcctgccgggggttggcctctcaagcctcaggggttctagcctgttgaatataccccacctggtggtggcccctccgatgtccccactgatggctctgacaccgtgttggtggcgatgtcccagacaatcccaccaggacggcccagacatccctactggcttcgctggtggctcatctcgaacatccacgccagcctttctggggccggccacccaggccgcctgtccgtctgtcctccctccagcagcaccccctggcccctggagtggtggggccatggcaagagacaccgtggcgtctcatgtgaactttcctgggcactgtggttttatttcctaattgatttaagaaataaacctgaagaccgtcaaaaaaaaaaaaaaa

SEQ ID NO: 509 - DNA, 506 bp, Homo sapiens
gtagagacgggatttccgccatgttgcccacgctgttccccaacttctgaactcaagcgatccgccagcctctgcctcccaaagtactgggattacgggcgtgacacccgtgcacagccagtgacttcttaatatatatcctaaagcgcaagaggcactggatatttgtggagtcttgataaccaccagggaggggcccaaggtaggagagaacaattgttctgagagacaagtaaccataaacaacgcgctgacacaacgaccttgctccacaggtagcccaaatggcacaacctcgatcagcatgtagccccctccagaagaccttataaaacttccctccagcccctgcctctttgcagacagccccttctctgtagtgctacatattgcacccttgcaatggaattttcatactttctctaataaatgtgcctttatttttctccccctacaactgtcttgggtaaattcctttaccaccgggcaacaccagccccagccag

SEQ ID NO: 510 - DNA, 358 bp, Homo sapiens
  modified_base (5)..(5): a, c, t or g
  modified_base (20)..(20): a, c, t or g
  modified_base (61)..(61): a, c, t or g
  modified_base (67)..(67): a, c, t or g
  modified_base (91)..(91): a, c, t or g
  modified_base (95)..(95): a, c, t or g
  modified_base (98)..(98): a, c, t or g
  modified_base (115)..(115): a, c, t or g
  modified_base (132)..(132): a, c, t or g
  modified_base (148)..(148): a, c, t or g
  modified_base (152)..(152): a, c, t or g
  modified_base (165)..(165): a, c, t or g
  modified_base (173)..(173): a, c, t or g
  modified_base (178)..(178): a, c, t or g
  modified_base (190)..(190): a, c, t or g
  modified_base (198)..(198): a, c, t or g
  modified_base (276)..(276): a, c, t or g
  modified_base (285)..(285): a, c, t or g
  modified_base (289)..(289): a, c, t or g
  modified_base (301)..(301): a, c, t or g
  modified_base (308)..(308): a, c, t or g
  modified_base (354)..(354): a, c, t or g
  modified_base (358)..(358): a, c, t or g
cctgncagcatattaggccntaagcacagcatagatccagggcctgaaaccatgagctcangtacancaggacactcttactatacttaanatcncanctctgattttctctctnctcatctcattcctttnactttttctaacattnattntaagttctggggnacaagtgnaggtntgttacacaggnaaactttngtaacggaggtcccgttgtacagattatttcatagcccaggtattaagcctcgcgcccagtaggtgtttttactgatnctctccctncttncatgctccaccntccaaanggccccagcgcgagtggatgccctctatgtgtccgtgtgttgctcntcan

SEQ ID NO: 511 - DNA, 452 bp, Homo sapiens
  modified_base (417)..(417): a, c, t or g
  modified_base (423)..(423): a, c, t or g
  modified_base (431)..(431): a, c, t or g
tacatcaaaatgtcttttatttgagacacaaaaatgcaaaattgctgagatatcaaacatttcccgatcagctacaatactgccactatgtacaaaagatctgatgataaatgtgcacacatataaaaatacagtatgcattacttatgtacagtacatgtgcaaaatgtatggcattcaaacatgatatggaattgatttcaggggtgcaaacagcaaatacaaaggcatcatggtttttcttttaaaaaacaacataaaggcaatagatgaatggacccccgattgccataattttttgttgattaaactagtgcttcaacaagcagggctctgtagattgggtatctttctcccttttttcataaagtggagatgccaagaccataatgtggaccaatggaaaataaggaaggngaaacnccctatcnccattggcatttccaattgcc

SEQ ID NO: 512 - DNA, 547 bp, Homo sapiens
  modified_base (510)..(510): a, c, t or g
gggtgatgctgtaaggaatcttgctaatttggtaggaagaggaagcatttaggaaagggtttagtatctaccaaaagtacttgacctcaagtaaccaatagtaatgcaaacttgctttaaaggaaccaaaggcattgcaagtatttgccaaaaggaggcactttttatttaaaatttgagactaatgagatctcaaaaatcagccccaaaaaggtattatccatttaaggttataattttcactaagatgtagatatttctcttattgttttcatgtaaaatagtatagagttgttttgttggtttaagagtaacattcagtagtaatacaaagttttttttctatgtagaaattagttttcttttcttgcttgcaatagaaatgcaatgtgataggtgtttctcttcttattttcattgtcacattatgtcttagcatctcactttatgaaaaaaaggagaaagataccaatctacagagccctgcttgttgaagcactagtttaatcnacaaaaaattatggcatcgggggtccattcatctatt

SEQ ID NO: 513 - DNA, 8680 bp, Homo sapiens
ggagcggcggcggcggcggccggggaggttcacaataaaggtgctaagaaagagaatgtaagacaggaaaataattaaatattcttaccgagtgtcttcaataggccgtgtttaagaggcgtcttacactccctgttgccagtggctggaacacaatggatcacacaggggcgatagacaccgaggatgaagtgggacctttagcccatcttgctccaagtcctcagagtgaagctgtggctcatgaattccaggaactctccttgcagtccagtcaaaacttaccccctctgaacgaaaggaaaaatgtgctccagctgaggctgcaacaaaggaggacgagagaacaactagtggaccagggcatcatgccacctttgaagagcccagcggcattccatgaacagataaaaagcttggaacgagccagaactgaaaactttttgaaacacaagattcggagtcgaccagatcgttctgaacttgtcaggatgcacattttagaagaaacatttgcagagccatccctgcaggctactcagatgaagttgaaaagagctcgactagcagatgatctgaatgaaaagattgctcaaagacctggtcctatggagctggtagagaaaaacatccttcctgtggactccagtgttaaagaagcaattataggcgttgggaaggaggactatccccacactcagggcgatttctcatttgatgaagacagcagtgacgctttgtctccggaccagcctgcgagtcaggagtcacaggggtcagccgcgtccccaagtgagccaaaagttagtgaatcgccatctcctgtgactacaaacactccagcgcagtttgcttcagtgtccccaacagttcctgaattcttgaaaactcctccaactgcagatcagcctcccccacggcctgcagctcctgtcctccccacaaacactgtgtcctcagcaaagcctggcccagcactggtgaagcaaagccatcccaagaatccaaatgacaaacaccgtagcaaaaagtgcaaagatcccaaaccacgggtaaagaagttaaagtaccaccaatacattccaccagatcagaagggtgagaagaatgagccgcagatggactctaactacgcccgcctgctccagcagcagcagctgttcctgcaactgcagatcctgagtcagcagaagcagcactacaactaccagaccatcctgcctgcaccattcaagccactcaatgacaaaaatagtaacagtgggaattcagctttgaacaatgccacacctaacacaccaagacagaatacatctactcctgtgagaaagccaggacctctgccttctagcctggatgacttaaaggtatcagaactgaagacagaactgaagttaaggggtctgccagtgtcaggcaccaaaccggacctcattgagcgcctaaaaccctaccaggaagtgaacagcagcggccttgctgctgggggcatcgtggcagtgtcatcatcagccattgtcaccagtaacccagaagtcactgtggccttgccggttacaacactacacaacactgtgactagctcagtctctactctcaaggcagaattgccacctacaggaaccagcaacgcaacccgtgtggaaaatgttcattcccctctgcccatttcaccatctccctccgaacagtccagtctcagtactgatgacacaaacatggcagacactttcaccgagattatgaccatgatgtcgccttcacagttcttgagttcatctcctttgagaatgacaaataatgaagacagtctgagtcccaccagcagcactctgtcaaacctggaactggatgcagccgaaaaggatcgcaagcttcaggagaaagagaagcaaatcgaagagctgaagaggaaactggaacaagagcagaagctcgtggaagtgctgaaaatgcaacttgaggttgaaaaacgagggcagcagcagcggcccctggaagcccagcccagtgccccaggtcattctgtcaagtcagatcagaagcacggcagccttggctcctccatcaaagatgaggcctcactccctgactgctccagctccaggcagcccatcccagtagccagccacgctgtaggccagcccgtctctacaggtggccagacccttgttgccaaaaaggctgtagttatcaagcaagaggtccctgtgggccaggcagagcagcagagtgtcgtctcgcagttttatacttcaccacaagcaggaatgcagactcagcctcagatagcaactgctgcacaaataccaactgctgccttggcctcaggcttggccccaactgtacctcagacacaagacacgttcccgcagcatgtgctcagtcagcctcaacaagtcagaaaggttttcacaaactcagcatcatcaaatacagttcttccatatcagagacatcctgccccagctgtccagcagccctttatcaataaggcctccaacagtgttcttcaatccagaaatgctccgcttccatccctgcaaaatggacctaacacacccaacaagcctagttcacccccgccaccccagcaatttgtcgtccagcactctctatttgggagtccagtcgccaagacaaaagatcccccccgctatgaggaggccatcaagcagacacgcagcacacaggcccctctgccagagatttccaacgctcacagtcagcagatggatgacctctttgatatcctcattaagagtggagagatctccctccccataaaagaagaaccttctcctatttccaaaatgagaccagtgacagccagcatcaccacaatgccagtgaatacagtggtgtcccggccaccaccccaagtccaaatggcaccacctgtatctttagaacctatgggcagtttatctgccagcttagagaaccaactagaagctttcttggatggaactttaccctcagccaatgaaattcctccactacaaagcagcagtgaagacagagagcccttctctctgatcgaggacctccagaatgatctgctgagtcactcaggtatgctggaccattcacactcacccatggagacttccgagacccagtttgctgcaggtactccctgtctgtctctcgacctgtcagactcaaacttggacaacatggagtggttggacattaccatgcccaactcctcttcaggactcactcctctcagcaccaccgcgccgagcatgttctctgctgactttctagacccacaggacctaccgctgccatgggactaacgtcacagatttcttttctgagagttgatgaggtttaagaacatgaagattctaaaaggtcagtttttagagatagatctatagttgcattgttgcaatcaaaatatgttgtcacagaaagaataggtggaaggtcatagcctggaacccaagtttgaaaacatttcattgtgttcagtagtgaatttctacagtttaacatagcacagggccttctgaaaatcgcacttgtcaaagacgactcatctatttctccagacttcagtaaagaatgaaaagtacctttagataaaaacaaagaagagtaatatatgcagcacagtgacgttaggattctggtaattaactacatttaaatctctggtcactttaagaccctaaataaaaggcagacagctccactcaaaaactaaggctgatgtgagggaggtgagaggtcactgcacttggtacttcctagagacggccggagccaggcccaagacacagcagaggtcaaaggcagtggagagccttggccagttcagtgacagcttctggctgaagacttttggttctattcagaaacctgtgtcgtttttttggtgttgtagtttattttgtgattttttggaatcgtactttatatttccaaatttaaatttaaatgcaagatctttcaacataaacagaagatacctacaaaatactgtcagaagtccaggtatactgataacactgaaaattctattagcaaccttctgggttggttagattgattttaatgtatatattagacatttgtatgtatgctctgacattgtgatttgtacagcctacgctggggtaaggaaatgggtatccaaggtcctacttttttaatagctcgaatatttctagagtacttgagccacatgtatttctgtatttaaagaattgctgactaactttcaggtaaccagacccatctcaaagaaccaagaaaaggctttagcatgaaatatctttctgagctggcgagttagaagaatggaaggtaaggggaaggtctgtcatctacccaggacattcccatgatgagtacaggtcagattgtgccacaaggtgggcctccacgtccctgccctggccctctttcttctgtcactaaccctggttatcattttacaggcttgtaactggatattctaccagagctctcactatattgtcaagcctaagattgaaaaactggaggctttattagtgtttttatatagaaaacagttattacatatgtgttaagtcatttcttaagaattttctaaaatgccaactatcacaggattatttcaagctagtcattgaggtatatgacaaaatgtaaataacaaaaaactgaaatctaccaaaagagcatggagatttttcttaaataataatattgtgctctccacctcacccttgtgtaaaccctcaggtcaggttggttcccctgggtcacaaaatggtaaatgttccatactgacatgccggaggcagcctgacccgttatttggaaagaatttgtgaattatttctgggtttgtgttttgcctaagagctgatcttatttctgatttgtgtgtgtgtggtttataaattttactacgtgtaacaaaagtctgcttttccagcatgagcacactggagccctctgctcactggcacttcctgactcaaaggcactaacagtgctcatgtgccttccagacggttcaaggcagaggccactgtgctcagtgtagtctgtgatgaatagtttaagtgttcagaaattggtaaaccaacacacgggatacaataactctctgttaaccagaacaccgtcatttgaccaagccctacaagagtttaccacactagatgttctgtgaatcctcgagtcagttccattgagaggggcctgtctccagggccaggctatttacttgggaaagtatttttcttacagttcttggccacagtttttttgctgagggtttctgtctgggcctatcaggtccatacttagaccctgagcatcttcttcattcagatttgaatggcttattaaattagcaccaaatatcagtgggactgtagaaggtaaccgaacactagtaccattgactctcgttgaataactttatatttccataatcctgaattgtgtagatagttttctagctctcgggtccctttattgctttttaaaatagggtttgaaacatgccacaggaaggttgctctccaaaaatacacagtgcagtgcaagaaaatgctatctcattggcctactctcctatgaattgctaaagtgcccacttcacatatgtgtttaaacctttataaaccagtatttcacttttaaaaagacaaggcatctctacccattaactctgcaagccactccacttgcaccattccgcttgaccctcctctctcctggcttgggtcaccagccaggcacctgtgacacgagtgctgctctccaggatctccactacatgttccaggttggagtgaggacgcgctatgtgctcacactcatgtgacatgaccaaagatgatactctgtaaacaaggcccttctgaccggactcagtgcgtgtgatggtgagtgcaatgaggaagggtggatattgactaaagactggttgttgttgttgtttaggttagtgtcacagccattacagcacaagtcaaagtcgccagttgaattttcattatgcacgtgtgtggtttaagcagtggtactgttgtatatcatattgtaaagtatcatactgccaagaaaataactcctagaaaggcattatctcacatccccatcttactttcctacatgttctcaaaacacagtagtaccagccttacctttctgctgtatgtagatagtcagatcatcctactgggggtgggatgaatttaaaagttataccaaaatttctgtaaagtctttgaaagtctaggagtaggtggtcatcttgtacatttcagcaaagcatccactaggaaacctcataggacagtgttagtggttcacgttctagtgtttttcctgaaatgtgcaatctactgtatagtattgccacataattgtacatagatgtattctgaatttgtggaatttcttgcttagatactattgtgtttgtttcatatgaatatttttgtaattctaaaagagatcttatttaaatttcctttttaaaagccgcatggttctgtgatccatgtaactgacactttttggctttcagtgctgtttagaaacagtggcaaaggcagggtggtgctgcctgcaagctgctgcctatggaaggcaaagtcatagtaatgagatagcacctctgaactgtgcagtcagcataccctgagtgatggctcaggggcgcactacctattttgtcaccagagctgactcaggcttcctggaccctcaaccccagatcattccaggcagcatagctttcttcacagtcctttcagaattcccaggctgaaatcagccatagcagttgacaaaacagctatccccacaagtgatgagatagtccctttactgtcctcaaatggacttggccttagagacgtggtaaagcactttggcagggtttaaaatatttgtgagaagcccacatttcagtatacatcctcactggcttccatgcacccacctgacggtagcctcacagaagtcctggctgtcactcaggtggggagctcatggtgccgctggggactttttagagaaatgtaaagagaatagctattcagtgtctactagcagagcaacatgtgtcaatttaaccaaattcacaaataaccctccatttttcaatatctgctactgtaaacatgaatattgaatactgacaagagaatacccatacaaatcgtcccaccgccctagaggccacagaattagcccaaaattatcaaagaacattaactggaaggtcaggtttttcaaggaacatagcttacaaatgcatcagtgtgtatctggagagcatcctaactgcatttcaactcatcttttaagtgatttcagtcaaaactggaaaacaactaagatgtagtaatttttttttcctggttcaaaccttcaataacttgctcattcagcagtctctctgagctacatttttatttgtaaagtgactctgtctgcatggcaatgagcaggtgcgtgttttttccacattcgccctttcttgcagtatccagggaaacacatcattacaaagggtttctacctgaaatctttcatggaaggcctacaattcgaaaagctgcacatgtttacagaagagctcttaccctccatgcaaacactttgctctgtggtgtcacagctttgtgacaataagatggcaatctcggatctacaaggtgctgtcgggaatcaaataaaatatgttatcagagatatcatcacatctatagtgtttaacagagctttatgccaactactaagacaaagctttaacaaagtttatagaatactgaaactcgtaacaattacctctctacgtgatgctgtaaggaatcttgctaatttggtaggaagaggaagcatttaggaaagggtttagtatctaccaaaagtacttgacctcaagtaaccaatagtaatgcaaacttgctttaaaggaaccaaaggcattgccaagtatttgccaaaaggaggcactttttatttaaaatttgagactaatgagatctcaaaaatcagccccaaaaaggtattatccatttaaggttataattttcactaagatgtagatatttctcttattgttttcatgtaaaatagtatagagttgttttgttggtttaagagtaacattcagtagtaatacaaagttttttttctatgtagaaattagttttcttttcttgcttgcaatagaaatgcaatgtgataggtgtttctcttcttattttcattgtcacattatgtcttagcatctcactttatgaaaaaaaggagaaagataccaatctacagagccctgcttgttgaagcactagtttaatcaacaaaaaattatggcaatcgggggtccattcatctattgcctttatgttgttttttaaaagaaaaaccatgatgcctttgtatttgctgtttgcacccctgaaatcaattccatatcatgtttgaatgccatacattttgcacatgtactgtacataagtaatgcatactgtatttttatatgtgtgcacatttatcatcagatcttttgtacatagtggcagtattgtagctgatcgggaaatgtttgatatctcagcaattttgcatttttgtgtctcaaataaaagacattttgatgtaaaaaaaaaaaaaaaaaaaaaaaaaaaaaaaaaaaaaaaaaaaaaaa

SEQ ID NO: 514 - DNA, 273 bp, Homo sapiens
  modified_base (5)..(5): a, c, t or g
gagtngtgggggaggggggtttagagactgagtcttgctctgtcacttggtctagagcacagtgatgcaatcacagttcattgctgccccaaactcacggcctggagggatcttcctgcctcagcctccgatgtagctgggactacaagcatggggccacacctggctaataatgcttatctttaaatctgacagggttgacaaaccctggaaatgtgaaaccaacataactttaagccataactgatactaagaaaatcctggaaatcttca

SEQ ID NO: 515 - DNA, 254 bp, Homo sapiens
  modified_base (7)..(7): a, c, t or g
ggtgganggtctcactgtgttgtcccggctggtctctagcttctggcctcgggggatcctcccgccttggctcccaaggtagtggaattacaggcatgagcactgacccctgctgagccaggctgttttcaacattcaatggtcattgactatctttggcgtttaggagggccctccagggacaggcgtaggggcatcagtcaccccgccctcacaccccaacctgcagccacacttggttcaatcccaatgtc

SEQ ID NO: 516 - DNA, 765 bp, Homo sapiens
atgacgccgcggaggcggccccgtccccgcgctcccgcccctcccgccagggcagcccgggaggccagacgttgacgctgcagggagagggtggtgggcgcagccgctagggggcgcggcggggcggagcgcacctttccgcgggccgcggggatggcggcgcagggcgtagggcctgggccggggtcggcggcgcccccggggctggaggcggcccggcagaagctggcgctgcggcggaagaaggtgctgagcaccgaggagatggagctgtacgagctggcgcaggcggcgggcggcgctatcgaccccgacgtgttcaagatcctggtggacctgctgaagctgaacgtggcccccctcgccgtcttccagatgctcaagtccatgtgtgccgggcagaggctagcgagcgagccccaggaccctgcggccgtgtctctgcccacgtcgagcgtgcccgagacccgagggagaaacaaaggcagcgctgccctcgggggagcattggccctggcggaacgcagcagccgcgaaggatccagccagaggatgccacgccagcccagcgctaccaggctgcccaaggggggcgggcctgggaagagccctacacggggcagcacctaggatggggcagagacttgttgcatctttgtccccagcaaaggctacatgttacctccttcaattgataataaacctttctgagatgcagagggtccaggtcaaaaaaaaaaaaaaaaaaaaaaaaaaaaaaaaaaa

SEQ ID NO: 517 - DNA, 397 bp, Homo sapiens
cattaaggatgggaactttattagagcagtgtggatctgttcaacaaggccctggtgcaccacgctacaaaccactgtcgaaatgaggttgctaagagtcaccttgtggagggagagctgcaggtcccatctcatccagagctgctttgatctgaggtggggccctggagatgaacgaaagaaaggtggggagtgctgtgtattttttccccacaaatccaccagggctcattgtcagatcctgggctttcctttccacatcatttttagggactgaggccagttttgcatgattcagtgaccaggcatgtggcctgacttgtaggtggcaggtggggatggtgcaagctgacaggttgagtggccatggaccctgttcaggtaatcttgggggaag

SEQ ID NO: 518 - DNA, 148 bp, Homo sapiens
ccagggtggcttcaatctccccacctaggatgtcagccctgtccaaggaccttccctcttctccccagttcctgggcaatcacttcaccttggacaaaggatcagcacagctggcctccagatccacatcaccactcttccactcgat

SEQ ID NO: 519 - DNA, 3197 bp, Homo sapiens
ggaccacagctcctcccgtgcatccactcggcctgggaggttctggattttggctgtcgagggagtttgcctgcctctccagagaaagatggtcatgaggcccctgtggagtctgcttctctgggaagccctacttcccattacagttactggtgcccaagtgctgagcaaagtcgggggctcggtgctgctggtggcagcgcgtccccctggcttccaagtccgtgaggctatctggcgatctctctggccttcagaagagctcctggccacgtttttccgaggctccctggagactctgtaccattcccgcttcctgggccgagcccagctacacagcaacctcagcctggagctcgggccgctggagtctggagacagcggcaacttctccgtgttgatggtggacacaaggggccagccctggacccagaccctccagctcaaggtgtacgatgcagtgcccaggcccgtggtacaagtgttcattgctgtagaaagggatgctcagccctccaagacctgccaggttttcttgtcctgttgggcccccaacatcagcgaaataacctatagctggcgacgggagacaaccatggactttggtatggaaccacacagcctcttcacagacggacaggtgctgagcatttccctgggaccaggagacagagatgtggcctattcctgcattgtctccaaccctgtcagctgggacttggccacagtcacgccctgggatagctgtcatcatgaggcagcaccagggaaggcctcctacaaagatgtgctgctggtggtggtgcctgtctcgctgctcctgatgctggttactctcttctctgcctggcactggtgcccctgctcagggaaaaagaaaaaggatgtccatgctgacagagtgggtccagagacagagaacccccttgtgcaggatctgccataaaggacaatatgaactgatgcctggactatcagtaaccccactgcacaggcacacgatgctctgggacataactggtgcctggaaatcaccatggtcctcatatctcccatgggaatcctgtcctgcctcgaaggagcagcctgggcagccatcacaccacgaggacaggaagcaccagcacgtttcacacctcccccttccctctcccatcttctcatatcctggctcttctctgggcaagatgagccaagcagaacattccatccaggacactggaagttctccaggatccagatccatggggacattaatagtccaaggcattccctcccccaccactattcataaagtattaaccaactggcaccaaggaattgcctccagcctgagtcctaggctctaaaagatattacatatttgaactaatagaggaactctgagtcacccatgccagcatcagcttcagccccagaccctgcagtttgagatctgatgcttcctgagggccaaggcattgctgtaagaaaaggtctagaaataggtgaaagtgagaggtgggggacaggggtttctctttctggcctaaggactttcaggtaatcagagttcatgggccctcaaaggtaaattgcagttgtagacaccgaggatggttgacaacccatggttgagatgggcaccgttttgcaggaaacaccatattaatagacatcctcaccatctccatccgctctcacgcctcctgcaggatctgggagtgagggtggagagtctttcctcacgctccagcacagtggccaggaaaagaaatactgaatttgccccagccaacaggacgttcttgcacaacttcaagaaaagcagctcagctcaggatgagtcttcctgcctgaaactgagagagtgaagaaccataaaacgctatgcagaaggaacattatggagagaaagggtactgaggcactctagaatctgccacattcattttcaaatgcaaatgcagaagacttaccttagttcaaggggaggggacaaagaccccacagcccaacagcaggactgtagaggtcactctgactccatcaaactttttattgtggccatcttaggaaaatacattctgcccctgaatgattctgtctagaaaagctctggagtattgatcactactggaaaaacacttaaggagctaaacttaccttcggggattattagctgataaggttcacagtttctctcacccaggtgtaactggattttttctggggcctcaatccagtcttgataacagcgaggaaagaggtattgaagaaacaggggtgggtttgaagtactattttccccagggtggcttcaatctccccacctaggatgtcagccctgtccaaggaccttccctcttctcccccagttccctgggcaatcacttcaccttggacaaaggatcagcacagctggcctccagatccacatcaccactcttccactcgattgttcccagatcctccctgcctggcctgctcagaggttccctgttggtaacctggctttatcaaattctcatccctttcccacacccacttctctcctatcaccttcccccaagattacctgaacagggtccatggccactcaacctgtcagcttgcaccatccccacctgccacctacagtcaggccacatgcctggtcactgaatcatgcaaaactggcctcagtccctaaaaatgatgtggaaaggaaagcccaggatctgacaatgagccctggtggatttgtggggaaaaaatacacagcactccccacctttctttcgttcatctccagggccccacctcagatcaaagcagctctggatgagatgggacctgcagctctccctccacaaggtgactcttagcaacctcatttcgacagtggtttgtagcgtggtgcaccagggccttgttgaacagatccacactgctctaataaagttcccatccttaatgactcacttgtcaactagtggactaattaaccctccaccaaaaaaacacaaagtgcttctgtgagaccaattttgtgctaatgagcattgagactgatgctttgtaagtcacaccacaacaaatattgattgagggcgctgcatgtgctgggtacatttcttggcacttgggaatcagtagtcaagcgaaacccttgcctttgagagtttatggtctggataatataaataaacaagtaagcataaaaaaaaaaaaaaaaa

SEQ ID NO: 520 - DNA, 410 bp, Homo sapiens
caggtttttattatttattattattgtttgttttgagatgcaatcttgctctgtcacgcaggttggtgtgcaatggtgcgatcttggctcactacaacctccgcctcacgggttcaagcaattctcctgcctcagcctcccaagtagctgggatgatgggcgtccgcgccgtgcctgggtaaatttctgcatttttagtccagatggggtttcaccatgttgggcaggctggtcttgaactcctgacctcaggtgatccgcctgccttggctcccaaagtgctgggattacaggcgtgcaacccgcgcctggccccaaatgtcatgtttttaaataaaaacatagaaaatgatataaaggttcacagcatcatcaagaaaacagttcccccgtgtcgcggaggggagatg

SEQ ID NO: 521 - DNA, 224 bp, Homo sapiens
  modified_base (5)..(5): a, c, t or g
gcagngggaacgtcttctcatgctccgtgatgcatgagggtctgcacaaccactacacgcagaagagcctctccctgtctccgggtaaatgagtgcgacggccggcaagcccccgctccccgggctctcgcggtcgcacgaggatgcttggcacgtaccccgtgtacatacttcccgggcgcccatcatggaaataaagcacccagcgctgccctgggccctgc

SEQ ID NO: 522 - DNA, 433 bp, Homo sapiens
caacttttgagatttccattttatttaatatatcagcctggcaattaatcatcacctttccaacacattcaagcagatgtttgttgttatatgtagccaggtgttagaccaggaagattggaccaaataatctagcataaagtagaagttgaaagcagaagttcaagggtttttgttgttgttgttttttggtaagtcacctcacagcttattagccagcctgtgtttgaaccaccatttgggtaccttctctgttttaataaggcctcatccctgcaccagcatcctaaccatttttctcaaatgggagagacgggtgctataaacaacccaatttaggctagaaagggaaactaaatattttgtgtaacatccaaatactctctggttggccaattttgggttctaaagaaatgggaccaaatttctcccc

SEQ ID NO: 523 - DNA, 1686 bp, Homo sapiens
gcttaagttgacctctgggtccggaatcgcgggcaaagatggcggcggccaggtgttggaggcctttgctacgcggtccgaggctttcattgcacaccgcggctaatgccgccgccacggctacagaaacgacctgccaagacgtcgcggcgacccccgtcgcgcggtacccgccgattgtggcctccatgacagccgacagcaaagctgcacggctgcggcggatcgagcgctggcaggcgacggtgcacgctgcggagtcggtagacgagaagctgcgaatcctcaccaagatgcagtttatgaagtacatggtttacccgcagaccttcgcgctgaatgccgaccgctggtaccagtacttcaccaagaccgtgttcctgtcgggtctgccgccgcccccagcggagcccgagcccgagcccgaacccgaacctgaacctgcgctggacctcgcggcgctgcgtgcggtcgcctgcgactgcctgctgcaggagcacttctacctgcggcgcaggcggcgcgtgcaccgttacgaggagagcgaggtcatatctttgcccttcctggatcagctggtgtcaaccctcgtgggcctcctcagcccacacaacccggccctggccgctgccgccctcgattatagatgcccagttcatttttactgggtgcgtggtgaagaaattattcctcgtggtcatcgaagaggtcgaattgatgacttgcgataccagatagatgataaaccaaacaaccagattcgaatatccaagcaactcgcagagtttgtgccattggattattctgttcctatagaaatccccactataaaatgtaaaccagacaaacttccattattcaaacggcagtatgaaaaccacatatttgttggctcaaaaactgcagatccttgctgttacggtcacacccagtttcatctgttacctgacaaattaagaagggaaaggcttttgagacaaaactgtgctgatcagatagaagttgtttttagagctaatgctattgcaagcctttttgcttggactggagcacaagctatgtatcaaggattctggagtgaagcagatgttactcgaccttttgtctcccaggctgtgatcacagatggaaaatacttttcctttttctgctaccagctaaatactttggcactgactacacaagctgatcaaaataaccctcgtaaaaatatatgttggggtacacaaagtaagcctctttatgaaacaattgaggataatgatgtgaaaggttttaatgatgatgttctacttcagatagttcactttctactgaatagaccaaaagaagaaaaatcacagctgttggaaaactgaaaaagcatatttgattgagaactgtgggaatatttaaattttactgaaggaacaataatgatgagatttgtaactgtcaactattaaatacattgatttttgagacaaatatttcttatgtcaacctgttattagatctcttactctgctcaaattcatcactgaaagatttaattttagttaccttttgttgatttaaaaataattgcatttgtatattgctaactgataagacaaattgagttattgagctattaaatgcacattttaatataaatgcagaaatcccaaataaaatgctaacatactgaaaaaaaaaaaaaaaaaa

SEQ ID NO: 524 - DNA, 452 bp, Homo sapiens
  modified_base (408)..(408): a, c, t or g
  modified_base (440)..(440): a, c, t or g
ttttgtcaataaaactttaggaatatctgcacatgtacatttacattcaagttgataacactggtggtttcatttcaatacaaattatgctagagaactgacatttcagacatggtcatatatatgctatttgaattcctttatcttcgatacagatcttgattgtgaatctcttgatgatagatgtgcagctaatttgtcccgaaactcatgaagataattgtattgcttgatggtctgtattgccccggatcctcttaggtctcgcaggctgtctatggcttgctctggtgatattgtgtcagacaggtatagtaggagacaagcagctacaagacaagatctcccaagtcctccatagcagtgtattaagggttttccggtaatttttaaggcaggttgtaagcncttccattatttcacagcagctggccatgtcnggagtcccccca

SEQ ID NO: 525 - DNA, 472 bp, Homo sapiens
  modified_base (38)..(38): a, c, t or g
  modified_base (51)..(51): a, c, t or g
  modified_base (54)..(54): a, c, t or g
ggcacgagcggcaactggtctcgacgtggggcggccangactgaagcccangtntcaatacaaacaagtgagtttgactcatcagatgaagagcctattgaagatgaacagactccaattcatatatcatggctatctttgtcacgagtgaattgttctcagtttctcggtttatgtgctcttccaggttgtaaatttaaagatgttagaagaaatgtccaaaaagatacagaagaactaaagagctgtggtatacaacgacatatttgttttctgcaccagaggggaactgtcaaaatatagagtcccaaaccttctggatctctaccagcaatgtggaattatcacccatcatcatccaatccgcagatggagggactcctgacatagccagctgctgtgaaataatggaagagcttacaacctgccttaaaaattaccgaaaaaccttaatacactgctatggaggact

SEQ ID NO: 526 - DNA, 492 bp, Homo sapiens
  modified_base (438)..(438): a, c, t or g
  modified_base (454)..(454): a, c, t or g
  modified_base (467)..(467): a, c, t or g
  modified_base (473)..(473): a, c, t or g
  modified_base (478)..(478): a, c, t or g
ttttttttttcaaaagtcttggaggatgaagaattatgactttcaccaccactatagtgttcatataaagttttagcagctttcaaaatggagttaggagaattcagaccaacaagttggcccagaacatatttcatttcttcagtggttcccttggccatttggttaactggatgagtttgaatttgaacatagggatgagccagggagctcagggaatgggatatcctctgttttgggtccctttttaaacaacactttaacacatcttgaagatctttctctgggaatatcggggaaatttcaatttcatggattagggatcaattatgggcatggtaatttagggaaatctggattaattatctggctggaatggggggttttccccgtaaggtcatataggtacaaaatacatcccaggggcccaaacatcantttgggggggcttatncttggactagggnttcccnttctntcggggggggaggg

SEQ ID NO: 527 - DNA, 509 bp, Homo sapiens
  modified_base (239)..(239): a, c, t or g
  modified_base (303)..(303): a, c, t or g
  modified_base (339)..(339): a, c, t or g
  modified_base (375)..(375): a, c, t or g
  modified_base (381)..(381): a, c, t or g
  modified_base (417)..(417): a, c, t or g
  modified_base (433)..(433): a, c, t or g
  modified_base (451)..(451): a, c, t or g
  modified_base (484)..(484): a, c, t or g
  modified_base (503)..(503): a, c, t or g
gacagactactaaagccaggtttttatatggagagaacatgccaccacaagatgcagaaataggttaccggaattcattgagacaaactaacaaaactaaacagtcatgcccatttggaagagtcccagttaaccttctaaatagcccagattgtgatgtgaagacagatgattcagttgtaccttgttttatgaaaagacaaacctctagatcagaatgccgagatttggttgtgccnggatctaaaccaagtgggaaatgattcctgtgaatttaaggaattttaaagtctgtttccaaantagttcattttcaagggaacctctgggtgttcaggntggaaaaggagtttctggaacttattatttactggnttccantaacccctgggagggatttaaacggggattccagtnctttcttaggcttaanttaggggagggaactttnaggagtttcccaggacccggaggtttccccggnggagtttaccccgggaacntggggc

SEQ ID NO: 528 - DNA, 2984 bp, Homo sapiens
ggaaattcaaacgtgtttgcggaaaggagtttgggttccatcttttcatttccccagcgcagctttctgtagaaatggaatccgaggatttaagtggcagagaattgacaattgattccataatgaacaaagtgagagacattaaaaataagtttaaaaatgaagaccttactgatgaactaagcttgaataaaatttctgctgatactacagataactcgggaactgttaaccaaattatgatgatggcaaacaacccagaggactggttgagtttgttgctcaaactagagaaaaacagtgttccgctaagtgatgctcttttaaataaattgattggtcgttacagtcaagcaattgaagcgcttcccccagataaatatggccaaaatgagagttttgctagaattcaagtgagatttgctgaattaaaagctattcaagagccagatgatgcacgtgactactttcaaatggccagagcaaactgcaagaaatttgcttttgttcatatatcttttgcacaatttgaactgtcacaaggtaatgtcaaaaaaagtaaacaacttcttcaaaaagctgtagaacgtggagcagtaccactagaaatgctggaaattgccctgcggaatttaaacctccaaaaaaagcagctgctttcagaggaggaaaagaagaatttatcagcatctacggtattaactgcccaagaatcattttccggttcacttgggcatttacagaataggaacaacagttgtgattccagaggacagactactaaagccaggtttttatatggagagaacatgccaccacaagatgcagaaataggttaccggaattcattgagacaaactaacaaaactaaacagtcatgcccatttggaagagtcccagttaaccttctaaatagcccagattgtgatgtgaagacagatgattcagttgtaccttgttttatgaaaagacaaacctctagatcagaatgccgagatttggttgtgcctggatctaaaccaagtggaaatgattcctgtgaattaagaaatttaaagtctgttcaaaatagtcatttcaaggaacctctggtgtcagatgaaaagagttctgaacttattattactgattcaataaccctgaagaataaaacggaatcaagtcttctagctaaattagaagaaactaaagagtatcaagaaccagaggttccagagagtaaccagaaacagtggcaatctaagagaaagtcagagtgtattaaccagaatcctgctgcatcttcaaatcactggcagattccggagttagcccgaaaagttaatacagagcagaaacataccacttttgagcaacctgtcttttcagtttcaaaacagtcaccaccaatatcaacatctaaatggtttgacccaaaatctatttgtaagacaccaagcagcaataccttggatgattacatgagctgttttagaactccagttgtaaagaatgactttccacctgcttgtcagttgtcaacaccttatggccaacctgcctgtttccagcagcaacagcatcaaatacttgccactccacttcaaaatttacaggttttagcatcttcttcagcaaatgaatgcatttcggttaaaggaagaatttattccattttaaagcagataggaagtggaggttcaagcaaggtatttcaggtgttaaatgaaaagaaacagatatatgctataaaatatgtgaacttagaagaagcagataaccaaactcttgatagttaccggaacgaaatagcttatttgaataaactacaacaacacagtgataagatcatccgactttatgattatgaaatcacggaccagtacatctacatggtaatggagtgtggaaatattgatcttaatagttggcttaaaaagaaaaaatccattgatccatgggaacgcaagagttactggaaaaatatgttagaggcagttcacacaatccatcaacatggcattgttcacagtgatcttaaaccagctaactttctgatagttgatggaatgctaaagctaattgattttgggattgcaaaccaaatgcaaccagatacaacaagtgttgttaaagattctcaggttggcacagttaattatatgccaccagaagcaatcaaagatatgtcttcctccagagagaatgggaaatctaagtcaaagataagccccaaaagtgatgtttggtccttaggatgtattttgtactatatgacttacgggaaaacaccatttcagcagataattaatcagatttctaaattacatgccataattgatcctaatcatgaaattgaatttcccgatattccagagaaagatcttcaagatgtgttaaagtgttgtttaaaaagggacccaaaacagaggatatccattcctgagctcctggctcatccctatgttcaaattcaaactcatccagttaaccaaatggccaagggaaccactgaagaaatgaaatatgttctgggccaacttgttggtctgaattctcctaactccattttgaaagctgctaaaactttatatgaacactatagtggtggtgaaagtcataattcttcatcctccaagacttttgaaaaaaaaaggggaaaaaaatgatttgcagttattcgtaatgtcaaataccacctataaaatatattggactgttatactcttgaatccctgtggaaatctacatttgaagacaacatcactctgaagtgttatcagcaaaaaaaattcagtagattatctttaaaagaaaactgtaaaaatagcaaccacttatggtactgtatatattgtagacttgttttctctgttttatgctcttgtgtaatctacttgacatcattttactcttggaatagtgggtggatagcaagtatattctaaaaaactttgtaaataaagttttgtggctaaaatgacactaaaaaaaaaaaaaaaaaa

SEQ ID NO: 529 - DNA, 425 bp, Homo sapiens
  modified_base (224)..(224): a, c, t or g
  modified_base (246)..(246): a, c, t or g
  modified_base (420)..(420): a, c, t or g
taagagagttttcacctttaaaatttattacataagctatacacacaaaatgaaatcctagttataaaagatgcatctagaagaataatttataataaaccaacaaaaatgagaatgtgtatctccaggaatataaatatatttaaatgttctcagtgactcggcattgctttatgcattacataagatagtatgtactaattaaggtattgaattcactgggntttagaaggccttaaaaaaaancccggttaattcaacaacaaaaatacagctcaactttgaactgcattaaaatccagaatctctcattttagatggaccattccttattcccctcaaaaggtttccaacagaagctatttcacaaactgattattagaatgtcttctccccactctccccaaaagccagtatgcntggga

SEQ ID NO: 530 - DNA, 268 bp, Homo sapiens
gattcggcacgatgggatatttatgtacatattaagataaatgtcatgtgtaagataactgataaatattggaactttgctagaacaagaccctgtagtaatagtaataatagttgaagtttggccaactcttaataaagttattttggtaactaatgttttatggcacttaagaataattagcagcgttaaattttgtttgtattaagcacttttaattttatccttcctaaaaatagtttattgtatctgacaagaaacttactta

SEQ ID NO: 531 - DNA, 4916 bp, Homo sapiens
agaattcggagcgcggaagagccagagctgcgagcgcctggagctggatctctctccggtcgcgcacgccgaggccagtagggagagaagatggtggttctccgcagcagcttggagctgcacaaccactccgcggcctcggccacgggctccttggacctgtccagtgacttcctcagtctggagcacatcggccggaggcggctccgctcggccggcgcggcgcagaagaaacccgcggcgaccacagccaaagcgggcgatgggtcatcagttaaggaagttgaaacctaccaccggacacgtgctttaagatctttgagaaaagatgcacagaattcttcagattctagttttgagaagaatgtggaaataacggagcaacttgctaatggcaggcattttacaaggcagttggccagacagcaggctgataaaaaaaaagaagagcacagagaagacaaagtgattccagttactcggtcattgagggctagaaacatcgttcaaagtacagaacacttacatgaagataatggtgatgttgaagtgcgtcgaagttgtaggattagaagtcgttatagtggtgtaaaccagtccatgctgtttgacaaacttataactaacactgctgaagctgtacttcaaaaaatggatgacatgaagaagatgcgtagacagcgaatgagagaacttgaagacttgggagtgtttaatgaaacagaagaaagcaatcttaatatgtacacaagaggaaaacagaaagatattcaaagaactgatgaagaaacaactgataatcaagaaggcagtgtggagtcatctgaagagggtgaagaccaagaacatgaagatgatggtgaagatgaagatgatgaagatgatgatgatgatgacgatgatgatgatgatgatgatgatgaagatgatgaagatgaagaagatggagaagaagagaatcagaagcgatattatcttagacagagaaaagctactgtttactatcaggctccattggaaaaacctcgtcaccagagaaagcccaacatattttatagtggcccagcttctcctgcaagaccaagataccgattatcttccgcaggaccaagaagtccttactgtaaacgaatgaacaggcgaaggcatgcaatccacagtagtgactcgacttcatcttcctcctctgaagatgaacagcactttgagaggcggaggaaaaggagtcgtaatagggctatcaataggtgcctcccactaaattttcggaaagatgaattaaaaggcatttataaagatcgaatgaaaattggagcaagccttgccgatgttgatccaatgcaactagattcttcagtacgatttgatagtgttggtggcctgtctaatcatatagcagctctaaaagagatggtggtgtttccattactttatccagaagtctttgaaaaatttaaaattcaacccccaagaggttgtttgttttatgggccacctggaactggaaagactctggttgccagagcacttgccaatgagtgcagtcaaggggataaaagagtagcatttttcatgaggaaaggtgctgattgtctaagtaaatgggtaggagaatctgaaagacagctacgattgctgtttgatcaggcctatcagatgcgcccatcaattattttttttgacgaaattgatggtctggctccagtacggtcaagcaggcaagatcagattcacagttctattgtttccaccctgctagctcttatggatggattggacagcagaggggaaattgtggtcattggtgctacgaacaggctagattctatagatcctgctttacgaaggcctggtcgctttgatagagaattcctctttagcctgcctgataaagaggctcgaaaagagattctaaagattcacaccagggattggaatcccaaaccactggacacatttttagaagagctagcagaaaactgtgttggatactgtggagcagatattaaatcaatatgtgctgaagctgctttatgtgctttacgacgacgctacccacagatctataccactagtgagaaactgcagttggatctctcttcaattaatatctcagctaaggatttcgaggtagctatgcaaaagatgataccagcctcccaaagagctgtgacatcacctgggcaggcactgtccaccgttgtgaaaccactcctgcaaaacactgttgacaagattttagaagccctgcagagagtatttccacatgcagaattcagaacaaataaaacattagactcagatatttcttgtcctctgctagaaagtgacttggcttacagtgatgatgatgttccatcagtttatgaaaatggactttctcagaaatcttctcataaggcaaaagacaattttaattttcttcatttgaatagaaatgcttgttaccaacctatgtcttttcgaccaagaatattgatagtaggagaaccaggatttgggcaaggttctcacttggcaccagctgtcattcatgctttggaaaagtttactgtatatacattagacattcctgttctttttggagttagtactacatcccctgaagaaacatgtgcccaggtgattcgtgaagctaagagaacagcaccaagtatagtgtatgttcctcatatccacgtgtggtgggaaatagttggaccgacacttaaagccacatttaccacattattacagaatattccttcatttgctccagttttactacttgcaacttctgacaaaccccattccgctttgccagaagaggtgcaagaattgtttatccgtgattatggagagatttttaatgtccagttaccggataaagaagaacggacaaaattttttgaagatttaattctaaaacaagctgctaagcctcctatatcaaaaaagaaagcagttttgcaggctttggaggtactcccagtagcaccaccacctgagccaagatcactgacagcagaagaagtgaaacgactagaagaacaagaagaagatacatttagagaactgaggattttcttaagaaatgttacacataggcttgctattgacaagcgattccgagtgtttactaagcctgttgaccctgatgaggttcctgattatgtcactgtaataaagcaaccaatggacctttcatctgtaatcagtaaaattgatctacacaagtatctgactgtgaaagactatttgagagatattgatctaatctgtagtaatgccttagaatacaatccagatagagatcctggagatcgtcttattaggcatagagcctgtgctttaagagatactgcctatgccataattaaagaagaacttgatgaagactttgagcagctctgtgaagaaattcaggaatctagaaagaaaagaggttgtagctcctccaaatatgccccgtcttactaccatgtgatgccaaagcaaaattccactcttgttggtgataaaagatcagacccagagcagaatgaaaagctaaagacaccgagtactcctgtggcttgcagcactcctgctcagttgaagaggaaaattcgcaaaaagtcaaactggtacttaggcaccataaaaaagcgaaggaagatttcacaggcaaaggatgatagccagaatgccatagatcacaaaattgagagtgatacagaggaaactcaagacacaagtgtagatcataatgagaccggaaacacaggagagtcttcggtggaagaaaatgaaaaacagcaaaatgcctctgaaagcaaactggaattgagaaataattcaaatacttgtaatatagagaatgagcttgaagactctaggaagactacagcatgtacagaattgagagacaagattgcttgtaatggagatgcttctagctctcagataatacatatttctgatgaaaatgaaggaaaagaaatgtgtgttctgcgaatgactcgagctagacgttcccaggtagaacagcagcagctcatcactgttgaaaaggctttggcaattctttctcagcctacaccctcacttgttgtggatcatgagcgattaaaaaatcttttgaagactgttgttaaaaaaagtcaaaactacaacatatttcagttggaaaatttgtatgcagtaatcagccaatgtatttatcggcatcgcaaggaccatgataaaacatcacttattcagaaaatggagcaagaggtagaaaacttcagttgttccagatgatgatgtcatggtatcgagtattctttatattcagttcctatttaagtcatttttgtcatgtccgcctaattgatgtagtatgaaaccctgcatctttaaggaaaagattaaaatagtaaaataaaagtatttaaactttcctgatatttatgtacatattaagataaatgtcatgtgtaagataactgataaatattggaactttgctagaacaagaccctgtagtaatagtaataatagttgaagtttggccaactcttaataaagttattttggtaactaatgttttatggcacttaagaataattagcagcgttaaattttgtttgtattaagcacttttaattttatccttcctaaaaatagtttattgtatctgacaagaaacttacttaaccattgtgtccttcccatcttttttgtcatctttgttttcttcaaatgccctcctcccatctgccttgagattcccttgtcttcacttaaaagccagagtgcaagtcatgatttgcgggagggctcttgaaccacttctggctgcaccacaattctgtacttgagtatcacagtcattgtttttgagacaaacatttttataattctaatttgggttaataaagattttaaatatttaaaaaaaaaaaaaaaaaaaa

SEQ ID NO: 532 - DNA, 481 bp, Homo sapiens
  modified_base (366)..(366): a, c, t or g
taacaacatatcttagaggtagtcctatttcaatttagctagacccatttcattctgtttaatggctacatttgtttttcattgtgagactgtgccataatttatttaatcagtgccatattgaaagacatttggatcgtttcccagcatttgcaactataatcaaggttacattaaatatcctgttacatgcaggaagatactttattcacatgcatgggtatatcagtaggttaaaactcaaatacagaaactgccaggtcaagagatacacatcttaaagtttaatagatattgaccctgtttctaaaaagaaagattccttccagcatgtctacacacatttgtctgctcctctggtcttcnggattcctggtccccatgggtgttaattttagggctgaaataatggaatatggtgggctccaaaaaccttattccccataggatctccgggggaagccttgggggcctgccacat

SEQ ID NO: 533 - DNA, 438 bp, Homo sapiens
  modified_base (414)..(414): a, c, t or g
cctgcaaagccttttcctggagtttattggtgatcccaagcctccagcctggaacggctacctcctcgccgtgctgatgttcctctcggcctgcctgcaaacgctgtttgagcagcagaacatgtacaggctcaaggtgctgtagatgaggctgcggtcggccatcactggctggtgtacagaaaggcatccacagcatatctgaagaaatattcagaagttaactaatctcagatgatttcagcaggagtaaagaagagaaacagactcagaaatgccattacaacagttaattatgtcaaatttatcaccctgattgatcacgcagcattaacctcaagaaccgccaagccaagtttttttgacaaatgttgagccaaggtttccgaaaaactagcagatatgactgtgacntacaaatggaaaaagtaaacgagg

SEQ ID NO: 534 - DNA, 433 bp, Homo sapiens
  modified_base (167)..(167): a, c, t or g
  modified_base (170)..(170): a, c, t or g
  modified_base (329)..(329): a, c, t or g
  modified_base (341)..(341): a, c, t or g
  modified_base (399)..(399): a, c, t or g
  modified_base (417)..(417): a, c, t or g
  modified_base (424)..(424): a, c, t or g
cgggtggagcatgggacctttattcgttaagacatcaggctccagatatgaactttcagcagaagcgcttgccgggagcaaagggacagaaaagctgagatgaacagtgcctggcagcaatcacagccgggcaagggtgctccgagcctcgcatcccccggccgcgncangctgggaggtgcctcagaaggtgcattctgcttcctgcaggggcttgaaacaccaaggcactccagggatcctggagtcaaagcagcagccccggttgttgcactccttgggggtgacatgggggtagccgcagtccaccctgtccttggctggcacgncacactggtttncagacaggcccacgtactcctcagcaaaacttgaagggacagcaaaggccaggaccanccccagcaatgcagaagngctcttngaagccatg

SEQ ID NO: 535 - DNA, 685 bp, Homo sapiens
gccaaaacagtgggggctgaactgacctctcccctttgggagagaaaaactgtctgggagcttgacaaaggcatgcaggagagaacaggagcagccacagccaggagggagagccttccccaagcaaacaatccagagcagctgtgcaaacaacggtgcataaatgaggcctcctggaccatgaagcgagtcctgagctgcgtcccggagcccacggtggtcatggctgccagagcgctctgcatgctggggctggtcctggccttgctgtcctccagctctgctgaggagtacgtgggcctgtctgcaaaccagtgtgccgtgccagccaaggacagggtggactgcggctacccccatgtcacccccaaggagtgcaacaaccggggctgctgctttgactccaggatccctggagtgccttggtgtttcaagcccctgcaggaagcagaatgcaccttctgaggcacctccagctgcccccggccgggggatgcgaggctcggagcacccttgcccggctgtgattgctgccaggcactgttcatctcagcttttctgtccctttgctcccggcaagcgcttctgctgaaagttcatatctggagcctgatgtcttaacgaataaaggtcccatgctccacccgaggacagttcttcgtgcctgaaaaaaaaaaaaaaaaaa

SEQ ID NO: 536 - DNA, 470 bp, Homo sapiens
  modified_base (176)..(176): a, c, t or g
  modified_base (348)..(348): a, c, t or g
  modified_base (368)..(368): a, c, t or g
  modified_base (388)..(388): a, c, t or g
  modified_base (398)..(398): a, c, t or g
  modified_base (432)..(432): a, c, t or g
  modified_base (440)..(440): a, c, t or g
  modified_base (452)..(452): a, c, t or g
  modified_base (460)..(460): a, c, t or g
aacaacttcttctgctattctgtgcttcagtctttcaagttctgttttttgctcactagcatcctgcattgacactgtgatcatttgaagggcagcatctgcttcatcttgcttcgttttaagtaacacactttgttctccagcttttctgttcagttcatccacaagagctttanttcatttagtttagatacaccagcctgcaaatgactttgtctttttaataattcctttttcttgctactactaatggcagaatacacatgtaaaaaagggtcatggaattggcttgggtgtagcaccatatgcttttacaagattcatgggattaataaaaatggattttangaaaatccaggatcaaactngaattttttttccctttccntcctttcggntttttaatcaatgggatttttcccccaccaaccnggtttcanctgggataacanttcagggnattttccctc

SEQ ID NO: 537 - DNA, 401 bp, Homo sapiens
  modified_base (24)..(24): a, c, t or g
  modified_base (328)..(328): a, c, t or g
  modified_base (337)..(337): a, c, t or g
  modified_base (362)..(362): a, c, t or g
  modified_base (372)..(372): a, c, t or g
tgatcaatagccttttgtcttcangtgaagttcctggactctatactcttgaagaattagagccttgctgttaccacttaaggatcaagcttcacaagatggtttttttggaccagtcttcaattacttcacatatagaattcagcaaaacttgcatattgtcttgataatggattctgcaaattcaaacttcatgataaactgtgagagtaatccagctttgcataagaatgccaggtgttgtggatggagggttggtccaatagcagtatgaagaaatacctgaaatgttaatcagtggaacaggtggtggaggaaaataccatgntaaaaaacngaaaggaggaaaggaaaaaaattcnggttgatccnggattttcctaaaaaccatttttattaat

SEQ ID NO: 538 - DNA, 430 bp, Homo sapiens
  modified_base (339)..(339): a, c, t or g
  modified_base (358)..(358): a, c, t or g
  modified_base (372)..(372): a, c, t or g
  modified_base (396)..(396): a, c, t or g
cattgacctgaaaaatccttgcttctctttttccttgagttgctctgaatgactaatattttcaggacttttccatggatcgaatgctggttgtctttttgagtggttggttccagaactgctctctgatggtagagaagaaactctagttgacacattattttcatggaaagaattgtctggacgtggagatggcactctgtaaaagctaccaactctccttggcacaggatcattgtataggtgtctattttctttgggggctgtgcaatcatcagagtgtgggtcatgatacactccaccctcagacttctgggcgtggtatgggaaggaagaggngccttccctgggagggtcnccttttgaccgaangatctttgccacagtcatcccctnggaaggggagctgtttctccaggctgggggtgac

SEQ ID NO: 539 - DNA, 520 bp, Homo sapiens
  modified_base (271)..(271): a, c, t or g
gacacagtgacacgagaactttgctcagcccttctggaagaaataaccgaaatgagggaacgctggactcacgtcgaaccacaaccagacattctaagacgatggaggaattgaagctgccggagcacatggacagtagccattcccattcactgtctgcacctcacgaatctttttcttatggactgggctacaccagccccttttcttcccagcaacgtcctcataggcattctatgtatgtgacccgtgacaaagtgagagccaaggnttggatggaagcttgagcatagggcaagggatggcagctagagccaacagcctgcaactcttgtcaccccagcctggagaacagctccctccagagatgactgtggcaagatcttcggtcaaagagacctccagagaaggcacctcttccttccatacacgccagaagtctgagggtggagtgtatcatgacccacactctgatgatggcacagcccccaaagaaaatagacacctatacaatgattct

SEQ ID NO: 540 - DNA, 3399 bp, Homo sapiens
cggcgacggcgtcctcaggagctgtggggtcccctgctagaagtgggggactcggcgggggagtcatttaatacttcatgattagaacaaatatgtgaaagttcccaccaaccagtgagaatttcttccttcagacggttttggatcttactgcacagctttctgagaagttcttttggtgccatgttttgtggcttgcatcaaaagaggagtttgtcttcatgaagattcctaacattggtaatgtgatgaataaatttgagatccttggggttgtaggtgaaggagcctatggagttgtacttaaatgcagacacaaggaaacacatgaaattgtggcgatcaagaaattcaaggacagtgaagaaaatgaagaagtcaaagaaacgactttacgagagcttaaaatgcttcggactctcaagcaggaaaacattgtggagttgaaggaagcatttcgtcggaggggaaagttgtacttggtgtttgagtatgttgaaaaaaatatgctcgaattgctggaagaaatgccaaatggagttccacctgagaaagtaaaaagctacatctatcagctaatcaaggctattcactggtgccataagaatgatattgtccatcgagatataaaaccagaaaatctcttaatcagccacaatgatgtcctaaaactgtgtgactttggttttgctcgtaatctgtcagaaggcaataatgctaattacacagagtacgttgccaccagatggtatcggtccccagaactcttacttggcgctccctatggaaagtccgtggacatgtggtcggtgggctgtattcttggggagcttagcgatggacagcctttatttcctggagaaagtgaaattgaccaactttttactattcagaaggtgctaggaccacttccatctgagcagatgaagcttttctacagtaatcctcgcttccatgggctccggtttccagctgttaaccatcctcagtccttggaaagaagataccttggaattttgaatagtgttctacttgacctaatgaagaatttactgaagttggacccagctgacagatacttgacagaacagtgtttgaatcaccctacatttcaaacccagagacttctggatcgttctccttcaaggtcagcaaaaagaaaaccttaccatgtggaaagcagcacattgtctaatagaaaccaagccggcaaaagtactgctttgcagtctcaccacagatctaacagcaaggacatccagaacctgagtgtaggcctgccccgggctgacgaaggtctccctgccaatgaaagcttcctaaatggaaaccttgctggagctagtcttagtccactgcacaccaaaacctaccaagcaagcagccagcctgggtctaccagcaaagatctcaccaacaacaacataccacaccttcttagcccaaaagaagccaagtcaaaaacagagtttgattttaatattgacccaaagccttcagaaggcccagggacaaagtacctcaagtcaaacagcagatctcagcagaaccgccactcattcatggaaagctctcaaagcaaagctgggacactgcagcccaatgaaaagcagagtcggcatagctatattgacacaattccccagtcctctaggagtccctcctacaggaccaaggccaaaagccatggggcactgagtgactccaagtctgtgagcaacctttctgaagccagggcccaaattgcggagcccagtaccagtaggtacttcccatctagctgcttagacttgaattctcccaccagcccaacccccaccagacacagtgacacgagaactttgctcagcccttctggaagaaataaccgaaatgagggaacgctggactcacgtcgaaccacaaccagacattctaagacgatggaggaattgaagctgccggagcacatggacagtagccattcccattcactgtctgcacctcacgaatctttttcttatggactgggctacaccagccccttttcttcccagcaacgtcctcataggcattctatgtatgtgacccgtgacaaagtgagagccaagggcttggatggaagcttgagcatagggcaagggatggcagctagagccaacagcctgcaactcttgtcaccccagcctggagaacagctccctccagagatgactgtggcaagatcttcggtcaaagagacctccagagaaggcacctcttccttccatacacgccagaagtctgagggtggagtgtatcatgacccacactctgatgatggcacagcccccaaagaaaatagacacctatacaatgatcctgtgccaaggagagttggtagcttttacagagtgccatctccacgtccagacaattctttccatgaaaataatgtgtcaactagagtttcttctctaccatcagagagcagttctggaaccaaccactcaaaaagacaaccagcattcgatccatggaaaagtcctgaaaatattagtcattcagagcaactcaaggaaaaagagaagcaaggatttttcaggtcaatgaaaaagaaaaagaagaaatctcaaacagtacccaattccgacagccctgatcttctgacgttgcagaaatccattcattctgctagcactccaagcagcagaccaaaggagtggcgccccgagaagatctcagatctgcagacccaaagccagccattaaaatcactgcgcaagttgttacatctctcttcggcctcaaatcacccggcttcctcagatccccgcttccagcccttaacagctcaacaaaccaaaaattccttctcagaaattcggattcaccccctgagccaggcctctggcgggagcagcaacatccggcaggaacccgcaccgaagggcaggccagccctccagctgccagacggtggatgtgatggcagaagacagagacaccattctggaccccaagatagacgcttcatgttaaggacgacagaacaacaaggagaatacttctgctgtggtgacccaaagaagcctcacactccgtgcgtcccaaaccgagcccttcatcgtccaatctccagtcctgctccctatccagtactccaggtccgaggcacttccatgtgcccgacactccaggtccgaggcactgatgctttcagctgcccaacccagcaatccgggttctctttcttcgtgagacacgttatgagggaagccctgattcacagggcccaggtaaaccaagctgcgctcctgacataccatgagaatgcggcactgacgggcaagtgacttctgcaagcctgcggctggtcccaatgccctgaatcacctctctcatggaagaaccaattaacaccaatgaatcaaccaaaac

SEQ ID NO: 541 - DNA, 447 bp, Homo sapiens
  modified_base (404)..(404): a, c, t or g
gcattgtaccttttaattgcatgggtagttttaaataaatggagaaagcacctttcagaagctacactagcaggaaaaaattccatcaagcatttacatagtaaatttctataatttcacaaaagattcttgatcttacttgaagtatacatgagggaaagagccccctcagcaggtgttcccgttgcttacagaagcaaactaaaggacctaaaactggaggcaagccaggatgccaaaaagggggaagagaaatgataaagaaccattcataaattccatgtctacttcaagacatttgtctaatgacccttacataataagtattttagggaaaactaccacccttttaagataaaagtacaatcttaaaagctgtagttctcaattatagtaatatttcntacttccagtaatatgtctcaataccttggactgctggatgtc

SEQ ID NO: 542 - DNA, 462 bp, Homo sapiens
  modified_base (452)..(452): a, c, t or g
aagaacctgtagaagatgacctcgttccggagctgggtatctcaaatctgctttcatccagccactgcccaaagccatcttcctgcctactggatgcttacagtgactgtggatacgggggttccctttccccattcagtgacatgtcctctctgcttggtgtaaaccattcttgggaggacacttttgccaatgaactctttccccagctgattagtgtctaaggaatgatccaatactgttgcccttttccttgactattacactgcctggaggatagcagagaagcctgtctgtacttcattcaaaaagccaaaatagagagtatacagtcctagagaattcctctatttgttcagatctcatagatgacccccaggtattgtcttttgacatcccaagcagtccaaggtattggagacatattactgggaagtaaagaaatattactnataattggag

SEQ ID NO: 543 - DNA, 1836 bp, Homo sapiens
ggcgctgggcggctgcggcgcgcggtgcgcggtgcgtagtctggagctatggtggtggtggcagccgcgccgaacccggccgacgggacccctaaagttctgcttctgtcggggcagcccgcctccgccgccggagccccggccggccaggccctgccgctcatggtgccagcccagagaggggccagcccggaggcagcgagcggggggctgccccaggcgcgcaagcgacagcgcctcacgcacctgagccccgaggagaaggcgctgaggaggaaactgaaaaacagagtagcagctcagactgccagagatcgaaagaaggctcgaatgagtgagctggaacagcaagtggtagatttagaagaagagaaccaaaaacttttgctagaaaatcagcttttacgagagaaaactcatggccttgtagttgagaaccaggagttaagacagcgcttggggatggatgccctggttgctgaagaggaggcggaagccaaggggaatgaagtgaggccagtggccgggtctgctgagtccgcagcactcagactacgtgcacctctgcagcaggtgcaggcccagttgtcacccctccagaacatctccccatggattctggcggtattgactcttcagattcagagtctgatatcctgttgggcattctggacaacttggacccagtcatgttcttcaaatgcccttccccagagcctgccagcctggaggagctcccagaggtctacccagaaggacccagttccttaccagcctccctttctctgtcagtggggacgtcatcagccaagctggaagccattaatgaactaattcgttttgaccacatatataccaagcccctagtcttagagataccctctgagacagagagccaagctaatgtggtagtgaaaatcgaggaagcacctctcagcccctcagagaatgatcaccctgaattcattgtctcagtgaaggaagaacctgtagaagatgacctcgttccggagctgggtatctcaaatctgctttcatccagccactgcccaaagccatcttcctgcctactggatgcttacagtgactgtggatacgggggttccctttccccattcagtgacatgtcctctctgcttggtgtaaaccattcttgggaggacacttttgccaatgaactctttccccagctgattagtgtctaaggaatgatccaatactgttgcccttttccttgactattacactgcctggaggatagcagagaagcctgtctgtacttcattcaaaaagccaaaatagagagtatacagtcctagagaattcctctatttgttcagatctcatagatgacccccaggtattgtcttttgacatccagcagtccaaggtattgagacatattactggaagtaagaaatattactataattgagaactacagcttttaagattgtacttttatcttaaaagggtggtagttttccctaaaatacttattatgtaagggtcattagacaaatgtcttgaagtagacatggaatttatgaatggttctttatcatttctcttccccctttttggcatcctggcttgcctccagttttaggtcctttagtttgcttctgtaagcaacgggaacacctgctgagggggctctttccctcatgtatacttcaagtaagatcaagaatcttttgtgaaattatagaaatttactatgtaaatgcttgatggaattttttcctgctagtgtagcttctgaaaggtgctttctccatttatttaaaactacccatgcaattaaaaggtacaatgcaaaaaaaaaaaaaaaaa

SEQ ID NO: 544 - DNA, 378 bp, Homo sapiens
  modified_base (299)..(299): a, c, t or g
  modified_base (304)..(304): a, c, t or g
  modified_base (326)..(326): a, c, t or g
  modified_base (347)..(347): a, c, t or g
  modified_base (352)..(352): a, c, t or g
tttttttttttttttattgcagaagtctgttgtctttaattaaaaaatgtagggatattagttatttcgactgcagaatcaagtgagtcccaaagttcccagcatctcctcatggtctttgttaggggtccaggctgactggggttcattggtgtccactgggggcagctcccgtgccttcagcagtcctgagtctccttctactgagtgtgggagtctgcgtaccctccgggctagtgggatggccaggggtggcgtagatgctgggctcagctgggaggttccctttcctggggatngaggnaggctcagttgccttccgtctnaggggtcaagctgtgcagctngggcntagggtcacatcctggggggggcttc

SEQ ID NO: 545 - DNA, 452 bp, Homo sapiens
  modified_base (108)..(108): a, c, t or g
  modified_base (203)..(203): a, c, t or g
  modified_base (348)..(348): a, c, t or g
  modified_base (406)..(406): a, c, t or g
  modified_base (441)..(441): a, c, t or g
ccttcatctcagtgcagccaggccccacagtggcctcaggagagaacgtgaccctgctgtgtcagtcatggcggcagttccacactttccttctgaccaaggcggganaggctgatgccccacagtggcctcaggagagaacgtgaccctgctgtgtcagtcatggcggcagttccacactttccttctgaccaaggcggganagctgatgccccactccgtctaagatcaatacacgaatatcctaagtaccagggtgaattccccatgagtcctgtgacctcagcccacgcggggaccttacaggtgctacgggttcacttcaattccgacccttacctggttgtnttcaccccagttgaggccctggggagctcgtgggtcttcagggaaccttccatggggntttccaggcccccccacccaccggttcccattttncacaattgggg

SEQ ID NO: 546 - DNA, 2221 bp, Homo sapiens
gctcactgccacacgcagctcagcctgggcggcacagccagatgcgagatgcgtctctgctgatctgagtctgcctgcagcatggacctgggtcttccctgaagcatctccagggctggagggacgactgccatgcaccgagggctcatccatccgcagagcagggcagtgggaggagacgccatgacccccatcgtcacagtcctgatctgtctcgggctgagtctgggccccaggacccacgtgcagacagggaccatccccaagcccaccctgtgggctgagccagactctgtgatcacccaggggagtcccgtcaccctcagttgtcaggggagccttgaagcccaggagtaccgtctatatagggagaaaaaatcagcatcttggattacacggatacgaccagagcttgtgaagaacggccagttccacatcccatccatcacctgggaacacacagggcgatatggctgtcagtattacagccgcgctcggtggtctgagctcagtgaccccctggtgctggtgatgacaggagcctacccaaaacccaccctctcagcccagcccagccctgtggtgacctcaggaggaagggtgaccctccagtgtgagtcacaggtggcatttggcggcttcattctgtgtaaggaaggagaagatgaacacccacaatgcctgaactcccagccccatgcccgtgggtcgtcccgcgccatcttctccgtgggccccgtgagcccgaatcgcaggtggtcgcacaggtgctatggttatgacttgaactctccctatgtgtggtcttcacccagtgatctcctggagctcctggtcccaggtgtttctaagaagccatcactctcagtgcagccgggtcctgtcgtggcccctggggaaagcctgaccctccagtgtgtctctgatgtcggctatgacagatttgttctgtacaaggagggggaacgtgaccttcgccagctccctggccggcagccccaggctgggctctcccaggccaacttcaccctgggccctgtgagccgctcctacgggggccagtacagatgctacggtgcatacaacctctcctccgagtggtcggcccccagcgaccccctggacatcctgatcacaggacagatccatggcacacccttcatctcagtgcagccaggccccacagtggcctcaggagagaacgtgaccctgctgtgtcagtcatggcggcagttccacactttccttctgaccaaggcgggagcagctgatgccccactccgtctaagatcaatacacgaatatcctaagtaccaggctgaattccccatgagtcctgtgacctcagcccacgcggggacctacaggtgctacggctcactcaactccgacccctacctgctgtctcaccccagtgagcccctggagctcgtggtctcaggaccctccatgggttccagccccccacccaccggtcccatctccacacctgcaggccctgaggaccagcccctcacccccactgggtcggatccccaaagtggtctgggaaggcacctgggggttgtgatcggcatcttggtggccgtcgtcctactgctcctcctcctcctcctcctcttcctcatcctccgacatcgacgtcagggcaaacactggacatcgacccagagaaaggctgatttccaacatcctgcaggggctgtggggccagagcccacagacagaggcctgcagtggaggtccagcccagctgccgacgcccaggaagaaaacctctatgctgccgtgaaggacacacagcctgaagatggggtggagatggacactcgggctgctgcatctgaagccccccaggatgtgacctacgcccagctgcacagcttgaccctcagacggaaggcaactgagcctcctccatcccaggaaagggaacctccagctgagcccagcatctacgccaccctggccatccactagcccggagggtacgcagactccacactcagtagaaggagactcaggactgctgaaggcacgggagctgcccccagtggacaccaatgaaccccagtcagcctggacccctaacaaagaccatgaggagatgctgggaactttgggactcacttgattctgcagtcgaaataactaatatccctacattttttaattaaagcaacagacttctcaataaaagcaggtcgtctcgttccaatct

SEQ ID NO: 547 - DNA, 537 bp, Homo sapiens
  modified_base (319)..(319): a, c, t or g
  modified_base (379)..(379): a, c, t or g
  modified_base (470)..(470): a, c, t or g
  modified_base (496)..(496): a, c, t or g
  modified_base (502)..(502): a, c, t or g
  modified_base (509)..(509): a, c, t or g
  modified_base (518)..(518): a, c, t or g
tttttttaattttccaatacatttattgaaaaaaaatccatgtataagtggacccacacagttcaaacccaagttgttcaaggattgactatttgtctatctaaacatacctaaacatagaaaaggtacagtaaaaatacagtattataatcttatgggatcaccattgtctatgcaggctgacattgaaatgtcattatgtacagcatgactgtatagtgtttccgagttctgtgaggctctctagcaaactaatggagctcaagaaggggttatgggaaccctaacttatagctagttggttaggacccttggtcancatctggggcttctgattgtcactgaagtgggagccatcttgtggcactgagccttcaanctatggaactgatgctatctccaggtagtgtaagaagtgaattgaattagaagacacccacctggtgctgtgaaaatgctattgctaatcntggggacccctcaaaaaatctggggnaaaggngtgtganataagtggngaacggaattgttatccta

SEQ ID NO: 548 - DNA, 251 bp, Homo sapiens
  modified_base (193)..(193): a, c, t or g
  modified_base (225)..(225): a, c, t or g
  modified_base (245)..(245): a, c, t or g
tagagaagctcaggtgtcatttttattctgtggttttaaaatgaaataatcttggttagtcacttacaactttgacgactttaaccacctgatgaaacctaccagtttctgcagcctcaggtctccataagggtcttcttaaattggctcctctcatttcaccaccagcttttggggcccaaggtcctaaggntgtgttcttgaagccaaatttccaccttaatnccatgttaaccacatgtggntaaacc

SEQ ID NO: 549 - DNA, 160 bp, Homo sapiens
  modified_base (18)..(18): a, c, t or g
  modified_base (44)..(44): a, c, t or g
gagccttgggatgcaganagctcggcagggttcctctcaatccngcaaccccagctgtcccaccggtggatgcagaggggaatccgaggccatcaaccttggtgacagcagcgcagtgccaatgctgatcacattgcatgggagattttgttaacgtctg

SEQ ID NO: 550 - DNA, 2366 bp, Homo sapiens
gaccacgcgtatcgatgtcgacccacaggattgtcacagagggcagggtggtgactgaggaccagctcctcatgcttgaggctgtggtgatgcacctcgggatccgctctgcccgctgtgtcctgggcatggagggtcagcaggtcatcctgcacctgcccctatcccagaaggggcccttctggacatgggagcctagtgcccctcgaactctgctccaggtcctacaggatccagccctgaaagacctcgtcctcacctgccccaccctgccctggcattccctgatcctgcggccccagtatgagatccaagccatcatgcacatgcgcaggaccattgtcaagatcccttctaccctggaggtcgacgtggaggacgtcaccgcctcctcccggcacgtccactttatcaaaccgctgctgctgagcgaggtcctggcctgggaaggccctttccccctgtccatggagatcctggaggttcctgagggccgccccatcttcctcagcccgtgggtgggctccttgcaaaaaggccagaggctttgcgtctatggcctagcctcaccaccctggcgggtcctggcctcaagcaagggccgcaaggtgcccaggcacttcctggtgtcagggggctaccaaggcaagctgcggcggcggccaagggagttccccacggcctatgacctcctaggtgctttccagccaggccggccactccgggtggtggccacaaaggactgtgagggcgagagggaggagaatcccgagttcacgtccctggctgtgggtgaccggctggaggtgctggggcctggccaggcccatggggcccagggcagtgacgtggatgtcttggtttgtcagcggctgagtgaccaggctggggaagatgaggaggaagagtgcaaagaggaggcagagacccagagcgggtcctgctgcccttccacttccctggcagtttcgtggaggagatgagtgacagccggcgctacagcctggcagatctgactgcccagttttcaatgccttgtgaggtcaaggtggtggccaaggacaccagccaccccaatgaccctcagaacctccttcctgggcctgcggctggaggagaagatcacagagccattcttggtggtgagcctggactctgagctgggatgtgctttgagatccctccccggaggctggacctgactgtcgtggaggccaaggggcagccagacttgccagaggggtctctccccatagccacagtggaggaagctggaacagacaccttttattattgtcttcggaagttaccagcctgtgagatccaagcccccccacccaggccccctaaaaatcagggcctcagcaagcagaggagacacagcagtgagggaggcgtcaagtcttctcaagtcttaggattgcagcaacacgttcggctgcccaaacccaaggcgaagaccttgccagagttcatcaaggatggctccagtacgtacagcaagattcctgcccacaggaagggccacaggcccgctaagccccaaaggcaggatctagatgatgatgaacatgattatgaagaaatacttgagcaatttcagaaaaccatctaagtgctggaggaaccacgcttcctaactgctgcttctcagggaatccgacaccagccaaccattttaagcctctaaaagacctcgggcaagtctcacagaaactgagctgcagacggggagtagctttgtggaaactgatttgatggacactgcaccagcttccttcaggttctagattcttgctacttagggcgggctggtttggacctaacatctcgcacgtgactccctcagcctcagagccttgggatgcagagcagctggcagggttcctctcaatcctgcaaccccagctgtcccaccggtggatgcagaggggaatccgaggccatcaaccttggtgacagcagcgcagtgccaatgctgatcacactgcatgggagattttgttaacgtctgccacccccactctcacccccaagctctaagcccccgggaggcctggactgtcttcctcatctctgtagcaccaagcctgatagatctgtatatggtaaacaggggtttaaccacatgtggttaacatggattaatgtgggaatttggcttcaagaacacaaccttaggaccttgggccccaaaagctggtggtgaaatgagaggagccaatttaagaagacccttatggagacctgaggctgcagaaactggtaggtttcatcaggtggttaaagtcgtcaaagttgtaagtgactaaccaagattatttcattttaaaaccacagaataaaaatgacacctgagcttctcc

SEQ ID NO: 551 - DNA, 419 bp, Homo sapiens
  modified_base (404)..(404): a, c, t or g
taagaaaaaccaatcgctttatttttcctcaatatatgtttagaaaactggtctgagaagaggtttcatgagatagaccagaggactatgtacaaaatcaagagttctaaaccaataagaaaaagggcacaatgaagcacacatccccaggggccacggcagcctaggaccttcctatcagtggggaggcaaggtctttgacggcttttgagttcagctgagggatcatgctgatcttcaggagtttgctgcttgcatacttattcttgatggcgatgaatttagttaagttttcatttactttcaccacattcttggccatgtgctgcatgacttccaatacttcatctctgtgtacctgtgtaatactgctgctttaagtccatttccttgtctagaacctntgagcaacaggaaca

SEQ ID NO: 552 - DNA, 263 bp, Homo sapiens
  modified_base (52)..(52): a, c, t or g
  modified_base (258)..(258): a, c, t or g
gtacgctagtgtcctcccttttcagtccgcgtccctccctgggccgggctgnactcttgccttccccgtccctcatggcgctgctccgacgcccgacggtgtccagtgatttggagaatattgacacaggagttaattctaaagttaagagtcatgtgactattaggcgaactgttttagaagaaattggaaatagagttacaaccagagcagcacaagtagctaagaaagctcagaacaccaaagttccagttcaanccacc

SEQ ID NO: 553 - DNA, 1530 bp, Homo sapiens
aatcctggaacaaggctacagcgtcgaagatccccagcgctgcgggctcggagagcagtcctaacggcgcctcgtacgctagtgtcctcccttttcagtccgcgtccctccctgggccgggctggcactcttgccttccccgtccctcatggcgctgctccgacgcccgacggtgtccagtgatttggagaatattgacacaggagttaattctaaagttaagagtcatgtgactattaggcgaactgttttagaagaaattggaaatagagttacaaccagagcagcacaagtagctaagaaagctcagaacaccaaagttccagttcaacccaccaaaacaacaaatgtcaacaaacaactgaaacctactgcttctgtcaaaccagtacagatggaaaagttggctccaaagggtccttctcccacacctgaggatgtctccatgaaggaagagaatctctgccaagctttttctgatgccttgctctgcaaaatcgaggacattgataacgaagattgggagaaccctcagctctgcagtgactacgttaaggatatctatcagtatctcaggcagctggaggttttgcagtccataaacccacatttcttagatggaagagatataaatggacgcatgcgtgccatcctagtggattggctggtacaagtccactccaagtttaggcttctgcaggagactctgtacatgtgcgttggcattatggatcgatttttacaggttcagccagtttcccggaagaagcttcaattagttgggattactgctctgctcttggcttccaagtatgaggagatgttttctccaaatattgaagactttgtttacatcacagacaatgcttataccagttcccaaatccgagaaatggaaactctaattttgaaagaattgaaatttgagttgggtcgacccttgccactacacttcttaaggcgagcatcaaaagccggggaggttgatgttgaacagcacactttagccaagtatttgatggagctgactctcatcgactatgatatggtgcattatcatccttctaaggtagcagcagctgcttcctgcttgtctcagaaggttctaggacaaggaaaatggaacttaaagcagcagtattacacaggatacacagagaatgaagtattggaagtcatgcagcacatggccaagaatgtggtgaaagtaaatgaaaacttaactaaattcatcgccatcaagaataagtatgcaagcagcaaactcctgaagatcagcatgatccctcagctgaactcaaaagccgtcaaagaccttgcctccccactgataggaaggtcctaggctgccgtgggccctggggatgtgtgcttcattgtgccctttttcttattggtttagaactcttgattttgtacatagtcctctggtctatctcatgaaacctcttctcagaccagttttctaaacatatattgaggaaaaataaagcgattggtttttcttaaggtaaaaaaaaaaaaaaaaaa

SEQ ID NO: 554 - DNA, 394 bp, Homo sapiens
  modified_base (370)..(370): a, c, t or g
ttttttttttttttataaggaacatttatttggtaaactatctcatagaaatagactctaaaatcaaacagtttcttaaacaacagagagcataatcccaatctctccccatgaaaagcctacttcataactgaagtacctaaagcccatgaactgcattactagaagaaaggagggaaaaagacatttactaaacttccacaggaagactgtataaatctggaagtggttaagtacacatcagcctgtatccaagaatactactcagtctcaaaaattaactgaaaatctaaacttaatatggatacttctttgtcttggtaaggctcagaaaattaccactatttaagtacgcaggtctagttccagncactgatatataaaaaggtgagtg

SEQ ID NO: 555 - DNA, 580 bp, Homo sapiens
  modified_base (520)..(520): a, c, t or g
  modified_base (537)..(537): a, c, t or g
  modified_base (549)..(549): a, c, t or g
  modified_base (572)..(572): a, c, t or g
  modified_base (579)..(579): a, c, t or g
ctggtggcctgggcattaatctgactgcagcagatacagttatcatttatgatagtgattggaacccccagtcggatcttcaggcccaggatagatgtcatagaattggtcagacaaagccagttgttgtttatcgccttgttacagcaaatactatcgatcagaaaattgtggaaagagcagctgctaaaaggaaactggaaaagttgatcatccataaaaatcatttcaaaggtggtcagtctggattaaatctgtctaagaatttcttagatcctaaggaattaatggaattattaaaatctagagattatgaaagggaaataaaaggatcaagagagaaggtcattagtgataaagatctagagttgttgttagatcgaagtgatcttattgatcaaatgaatgcttcaggaccaattaaagagaagatggggatattcaagatattagaaaattctgaagattccagtcctgaatgtttgttttaaagtggagctcaagaatagcttttaaaagntcttatttacatctagngatttcccctgnattgggtttgaaatactgattgnccacttnc

SEQ ID NO: 556 - DNA, 3165 bp, Homo sapiens
ggggatttggctagaaggctgggccggcagcggttgtgaggagttagctcgcggcattgcaggctctgagaggaggggacccggttcccgggtgagtgtccaggcatgccagcggaacggcccgcgggcagcggcggctcggaggctccagcaatggttgaacaactggacactgctgtgattaccccggccatgctagaagaggaagaacagcttgaagctgctggactagagagagagcggaagatgctggaaaaggctcgcatgtcttgggatagagagtcgacagaaattcggtaccgtagacttcaacatttgcttgaaaaaagcaatatatactccaaatttttattgacgaaaatggaacagcaacaattagaggaacagaagaagaaagaaaaattggagagaaaaaaggagtctttaaaagttaaaaagggtaaaaattcaattgatgcaagtgaagagaagccagttatgaggaaaaaaagaggaagagaagatgaatcatacaatatttcagaggtcatgtcaaaagaggaaattttgtctgtggctaaaaaaaataaaaaggagaatgaggatgaaaactcctcctctactaatctctgtgtggaagatcttcagaaaaataaagattcgaatagtataattaaagatagattgtctgaaacggttaggcagaatactaaattcttttttgacccagtccggaagtgtaatggtcagccagtaccttttcaacaaccaaagcacttcactggaggagtgatgcgatggtaccaagtagaaggcatggaatggcttaggatgctttgggaaaatggaattaatggcattttagcagatgaaatgggattgggtaagacagttcagtgcattgctactattgcattgatgattcagagaggagtaccaggaccttttcttgtctgtggccctttgtctacacttcctaactggatggctgaattcaaaagatttacaccagatatccctacaatgttatatcatggaacccaggaggaacgtcaaaaattggtaagaaatatttacaaacggaaagggactttgcagattcatcctgtggtaatcacgtcatttgaaatagccatgagagaccgaaatgcgttacagcattgctattggaaatacttaatagtagatgaaggacacaggattaagaatatgaagtgccgtctaatcagggagttaaaacgattcaatgctgataacaaacttcttttgactggtactcccttgcaaaacaatttatcagaactttggtcattgctaaactttttgttgccagatgtatttgatgacttgaaaagctttgagtcttggtttgacatcactagtctttctgaaactgctgaagatattattgctaaagaaagagaacagaatgtattgcatatgctgcaccagattttaacacctttcttattgagaagactgaagtctgatgttgctcttgaagttcctcctaaacgagaagtagtcgtttatgctccactttcaaagaagcaggagatcttttatacagccattgtgaaccgtacaattgcaaacatgtttggatccagtgagaaagaaacaattgagttaagtcctactggtcgaccaaaacgacgaactagaaaatcaataaattacagcaaaatagatgatttccctaatgaattggaaaaactgatcagtcaaatacagccagaggtggaccgagaaagagctgttgtggaagtgaatatccctgtagaatctgaagttaatctgaagctgcagaatataatgatgctacttcgtaaatgttgtaatcatccatatttgattgaatatcctatagaccctgttacacaagaatttaagatcgatgaagaattggtaacaaattctgggaagttcttgattttggatcgaatgctgccagaactaaaaaaaagaggtcacaaggtgctgcttttttcacaaatgacaagcatgttggacattttgatggattactgccatctcagagatttcaacttcagcaggcttgatgggtccatgtcttactcagagagagaaaaaaacatgcacagcttcaacacggatccagaggtgtttatcttcttagtgagtacacgagctggtggcctgggcattaatctgactgcagcagatacagttatcatttatgatagtgattggaacccccagtcggatcttcaggcccaggatagatgtcatagaattggtcagacaaagccagttgttgtttatcgccttgttacagcaaatactatcgatcagaaaattgtggaaagagcagctgctaaaaggaaactggaaaagttgatcatccataaaaatcatttcaaaggtggtcagtctggattaaatctgtctaagaatttcttagatcctaaggaattaatggaattattaaaatctagagattatgaaagggaaataaaaggatcaagagagaaggtcattagtgataaagatctagagttgttgttagatcgaagtgatcttattgatcaaatgaatgcttcaggaccaattaaagagaagatggggatattcaagatattagaaaattctgaagattccagtcctgaatgtttgttttaaagtggagctcaagaatagcttttaaaagttcttatttacatctagtgatttccctgtattgggtttgaaatactgattgtccacttcaccttttttattatatcagttgacatgtaactagtaccatgcgtacttaaatagatggtaattttctgagccttaccaagaacaaagaagtatccatattaagtttagattttcagttaatttttgagactgagtagtattcttggatacaggctgatgtgtacttaaccacttccagatttatacagtcttcctgtggaagtttagtaaatgtctttttccctcctttcttctagtaatgcagttcatgggctttaggtacttcagttatgaagtaggcttttcatggggagagattgggattatgctctctgttgtttaagaaactgtttgattttagagtctatttctatgagatagtttaccaaataaatgttccttataagatgaaaaaaaaaaaaaaaaaaaaaaaaaaaaaaaaaaaaaaaaaaaaaaaaaaaaaaaaaaaaaaaaaaa

SEQ ID NO: 557 - DNA, 394 bp, Homo sapiens
  modified_base (370)..(370): a, c, t or g
  modified_base (388)..(388): a, c, t or g
ttttctaattgagcaactttattcacataatttctacaccaagaactcgaggttatctctgatggaaccaatttcactaatatttactttaagggcagagaagtcaaccaagtcctcacagtctcaagaatcaaaaacaaaacaaaaatacaaacagagagcaagtgggaagataaataacactccgaaataacctagctacacacttttagtttccaatttttctagcatgaaatcacttttctcttccatcctgtaagaccgtgttctctcctctctcttctgagttggggctgtgaagagctgccctggtctcccggtctgacggtgttgtcaaccccatctgaggcacccagggaattgccctggngtcccggagccctggggnttctga

SEQ ID NO: 558 - DNA, 462 bp, Homo sapiens
  modified_base (454)..(454): a, c, t or g
cacacacagcgcaactcgcccgcagcagacatctgaccttcacgttcagggaaatagttctggaatatttagaaagtcagtgtcacccagcaaaactctttcagtcccagataaagaagtgccaggccacggaaggaatcgttacgatgaaattaaagaagaatttgacaagcttcatcaaaagtattgcctcaaatctcctgggcagatgacagtgcctttatgtattggagtgtctacagataaagcaagtatggaagttcgatatcaaacagaaggcttcttaggaaaattaaatccagaccctcacttccagggtttccagaagttgccatcatcacccctggggtgcaagaaaaagtctactgggctcaactggcaattgaggctccttccatctacatgtgttgctcgtgccatcacgaagggatggcacgaggggaaccatcagttncctgcaaa

SEQ ID NO: 559 - DNA, 2461 bp, Homo sapiens
atgctgggtacgctgcgcgccatggagggcgaggacgtggaagacgaccagctgctgcagaagctcagggccagtcgccgccgcttccagaggcgcatgcagcggctgatagagaagtacaaccagcccttcgaggacaccccggtggtgcaaatggccacgctgacctacgagacgccacagggattgagaatttggggtggaagactaataaaggaaagaaacaaaggagagatccaggactcctccatgaagcccgcggacaggacagatggctccgtgcaagctgcagcctggggtcctgagcttccctcgcaccgcacagtcctgggagccgattcaaaaagcggtgaggtcgatgccacgtcagaccaggaagagtcagttgcttgggccttagcacctgcagtgcctcaaagccctttgaaaaatgaattaagaaggaaatacttgacccaagtggatatactgctacaaggtgcagagtattttgagtgtgcaggtaacagagctggaagggatgtacgtgtgactccgctgccttcactggcctcacctgccgtgcctgcccccggatactgcagtcgtatctccggaaagagtcctggtgacccagcgaaaccagcttcatctcccagagaatgggatcctttgcatccttcctccacagacatggccttagtacctagaaatgacagcctctccctacaagagaccagtagcagcagcttcttaagcagccagccctttgaagatgatgacatttgcaatgtgaccatcagtgacctgtacgcagggatgctgcactccatgagccggctgttgagcacaaagccatcaagcatcatctccaccaaaacgttcatcatgcaaaactggaactgcaggaggaggcacagatataagagcaggatgaacaaaacatattgcaaaggagccagacgttctcagaggagctccaaggagaacttcataccctgctctgagcctgtgaaagggacaggggcattaagagattgcaagaacgtattagatgtttcttgccgtaagacaggtttaaaattggaaaaagcttttcttgaagtcaacagaccccaaatccataagttagatccaagttggaaggagcgcaaagtgacaccctcgaagtattcttccttgatttacttcgactccagtgcaacatataatcttgatgaggaaaatagatttaggacattaaaatggttaatttctcctgtaaaaatagtttccagaccaacaatacgacagggccatggagagaaccgtcagagggagattgaaatccgatttgatcagcttcatcgggaatattgcctgagtcccaggaaccagcctcgccggatgtgcctcccggactcctgggccatgaacatgtacagagggggtcctgcgagtcctggtggccttcagggcttagaaacccgcaggctgagtttaccttccagcaaagcaaaagcaaaaagtttaagtgaggcttttgaaaacctaggcaaaagatctctggaagcaggtaggtgcctgcccaagagcgattcatcttcatcacttccaaagaccaaccccacacacagcgcaactcgcccgcagcagacatctgaccttcacgttcagggaaatagttctggaatatttagaaagtcagtgtcacccagcaaaactctttcagtcccagataaagaagtgccaggccacggaaggaatcgttacgatgaaattaaagaagaatttgacaagcttcatcaaaagtattgcctcaaatctcctgggcagatgacagtgcctttatgtattggagtgtctacagataaagcaagtatggaagttcgatatcaaacagaaggcttcttaggaaaattaaatccagaccctcacttccagggtttccagaagttgccatcatcacccctggggtgcagaaaaagtctactgggctcaactgcaattgaggctccttcatctacatgtgttgctcgtgccatcacgagggatggcacgagggaccatcagttccctgcaaaaagacccaggctatcagaaccccagggctccggacgccagggcaattccctgggtgcctcagatggggtggacaacaccgtcagaccgggagaccagggcagctcttcacagcccaactcagaagagagaggagagaacacgtcttacaggatggaagagaaaagtgatttcatgctagaaaaattggaaactaaaagtgtgtagctaggttatttcggagtgttatttatcttcccacttgctctctgtttgtatttttgttttgtttttgattcttgagactgtgaggacttggttgacttctctgcccttaaagtaaatattagtgaaattggttccatcagagataacctcgagttcttggtgtagaaattatgtgaataaagttgctcaattagaaaaaaaaaaaaaaaaaaaa

SEQ ID NO: 560 - DNA, 331 bp, Homo sapiens
ttttgcttttggtcattttatttttattacaacttcattatttacaaaaccccccatccagatatattcacgttaacaattctgagataactgctgcatcacagttgcacaaaggctgatgagttgcaaatgttcatcagcaccatctgctaggcatttcgtcaacttcggcaagtttttctgtgataatagacttctgtttatcagataagttattttctacaaccacatcatggagttgattgacgagctgagttgctgcatgaccctcatctattaaatccttgaccacagcttcctagtttgtcaaaaagagccactcctggacagg

SEQ ID NO: 561 - DNA, 516 bp, Homo sapiens
  modified_base (328)..(328): a, c, t or g
taccaatctgaagtggttgcagtgctgaaaaaatctttagaaggagcagatcttcctaatctcttgttttacggaccacctggaactggaaaaacatccactattttggcagcagctagagaactctttgggcctgaacttttccgattaagagttcttgagttaaatgcatctgatcgaaccgtggaatacaagtagttccgagagaaagtgaaaaattttgctcaattaactgtgtcaggaagtcgctcagatgggaagccgtgtccgccttttaagattgtgattctggatgaagcagattctatgacctcagctgctcaggcancttttaagacgtaccatggagaaggagtccgaaaaccacccgattctgtcttatctgtaactatgtcagtccgaataattgaacccctgacctctagatgttcaaaattccgcttcaagcctctgtcagataaaaattcaacagcagcgattactagacattggccaagaaggaaaatgtccaaaatt

SEQ ID NO: 562 - DNA, 1427 bp, Homo sapiens
accggcgtattcccgccctgcttttcgcccgccgttccgtggcgggaactgaggcgactgtggggacatcagtgatcgtaagtctcctgggcccgttattctcagattaggtgacggagctaagacttcgagaccatctcgtcctttttgtatcgcggaaacctgaggaacgagccggcggcggtgacctgcacgagaagccaggctaactgggtgaagtaccatgcaagcatttcttaaaggtacatccatcagtactaaacccccgctgaccaaggatcgaggagtagctgccagtgcgggaagtagcggagagaacaagaaagccaaacccgttccctgggtggaaaaatatcgcccaaaatgtgtggatgaagttgctttccaggaagaagtggttgcagtgctgaaaaaatctttagaaggagcagatcttcctaatctcttgttttacggaccacctggaactggaaaaacatccactattttggcagcagctagagaactctttgggcctgaacttttccgattaagagttcttgagttaaatgcatctgatgaacgtggaatacaagtagttcgagagaaagtgaaaaattttgctcaattaactgtgtcaggaagtcgctcagatgggaagccgtgtccgccttttaagattgtgattctggatgaagcagattctatgacctcagctgctcaggcagctttaagacgtaccatggagaaggagtcgaaaaccacccgattctgtcttatctgtaactatgtcagtcgaataattgaacccctgacctctagatgttcaaaattccgcttcaagcctctgtcagataaaattcaacagcagcgattactagacattgccaagaaggaaaatgtcaaaattagtgatgagggaatagcttatcttgttaaagtgtcagaaggagacttaagaaaagccattacatttcttcaaagcgctactcgattaacaggtggaaaggagatcacagagaaagtgattacagacattgccggggtaataccagctgagaaaattgatggagtatttgctgcctgtcagagtggctcttttgacaaactagaagctgtggtcaaggatttaatagatgagggtcatgcagcaactcagctcgtcaatcaactccatgatgtggttgtagaaaataacttatctgataaacagaagtctattatcacagaaaaacttgccgaagttgacaaatgcctagcagatggtgctgatgaacatttgcaactcatcagcctttgtgcaactgtgatgcagcagttatctcagaattgttaacgtgaatatatctggatggggggttttgtaaataatgaagttgtaataaaaataaaatgaccaaaagcacctttaaaaaaaaaaaaaaaaaaaaaaaaaaaaaaaaaaaaaa

SEQ ID NO: 563 - DNA, 510 bp, Homo sapiens
  modified_base (438)..(438): a, c, t or g
  modified_base (489)..(489): a, c, t or g
  modified_base (494)..(494): a, c, t or g
ttttttttttttccaaaattgtgctttattaaatgctagttcattggaatgttaatacatgtttcacacacacaatcagcaggagaaaatgtttctatagccaaatgacattgataaacagtgttcttacacaaagttaagcctgtttctttattataagacttttcagatactttcccagtgcatagtgtgaatctccacaaagcaagtgaaacatgaatagctccctaaacttacttgaccacagaatgcttcattctatctccatggaaaccacttgtgaaagtctcctactccaactttcttctccaacaaaactcacctgtttgtgatcatctgaactcattttgtgctcttgcctttatataaaagagaagttctgtgaaatgttgaagaagcagggttatgggcactagtaatggatccaggcactatacnaattggttaaaattttccattattttaggttcagaagccctaaccataggnattcnaacagtggattgtgga

SEQ ID NO: 564 - DNA, 3916 bp, Homo sapiens
gagcaggaagtgtttgaggaagtcgcgccgcgctgcccgcgttaagattcccgcattttaatgttttcaggggggtgtcatagccccgggtttggccgccccagccccgccttccccgccccggggagcccgccccctgccccgcgtccctgccgacagagttagcacgacatcagtatgagctggtcaccttccctgacaacgcagacatgtggggcctgggaaatgaaagagcgccttgggacagggggatttggaaatgtcatccgatggcacaatcaggaaacaggtgagcagattgccatcaagcagtgccggcaggagctcagcccccggaaccgagagcggtggtgcctggagatccagatcatgagaaggctgacccaccccaatgtggtggctgcccgagatgtccctgaggggatgcagaacttggcgcccaatgacctgcccctgctggccatggagtactgccaaggaggagatctccggaagtacctgaaccagtttgagaactgctgtggtctgcgggaaggtgccatcctcaccttgctgagtgacattgcctctgcgcttagataccttcatgaaaacagaatcatccatcgggatctaaagccagaaaacatcgtcctgcagcaaggagaacagaggttaatacacaaaattattgacctaggatatgccaaggagctggatcagggcagtctttgcacatcattcgtggggaccctgcagtacctggccccagagctactggagcagcagaagtacacagtgaccgtcgactactggagcttcggcaccctggcctttgagtgcatcacgggcttccggcccttcctccccaactggcagcccgtgcagtggcattcaaaagtgcggcagaagagtgaggtggacattgttgttagcgaagacttgaatggaacggtgaagttttcaagctctttaccctaccccaataatcttaacagtgtcctggctgagcgactggagaagtggctgcaactgatgctgatgtggcacccccgacagaggggcacggatcccacgtatgggcccaatggctgcttcaaggccctggatgacatcttaaacttaaagctggttcatatcttgaacatggtcacgggcaccatccacacctaccctgtgacagaggatgagagtctgcagagcttgaaggccagaatccaacaggacacgggcatcccagaggaggaccaggagctgctgcaggaagcgggcctggcgttgatccccgataagcctgccactcagtgtatttcagacggcaagttaaatgagggccacacattggacatggatcttgtttttctctttgacaacagtaaaatcacctatgagactcagatctccccacggccccaacctgaaagtgtcagctgtatccttcaagagcccaagaggaatctcgccttcttccagctgaggaaggtgtggggccaggtctggcacagcatccagaccctgaaggaagattgcaaccggctgcagcagggacagcgagccgccatgatgaatctcctccgaaacaacagctgcctctccaaaatgaagaattccatggcttccatgtctcagcagctcaaggccaagttggatttcttcaaaaccagcatccagattgacctggagaagtacagcgagcaaaccgagtttgggatcacatcagataaactgctgctggcctggagggaaatggagcaggctgtggagctctgtgggcgggagaacgaagtgaaactcctggtagaacggatgatggctctgcagaccgacattgtggacttacagaggagccccatgggccggaagcaggggggaacgctggacgacctagaggagcaagcaagggagctgtacaggagactaagggaaaaacctcgagaccagcgaactgagggtgacagtcaggaaatggtacggctgctgcttcaggcaattcagagcttcgagaagaaagtgcgagtgatctatacgcagctcagtaaaactgtggtttgcaagcagaaggcgctggaactgttgcccaaggtggaagaggtggtgagcttaatgaatgaggatgagaagactgttgtccggctgcaggagaagcggcagaaggagctctggaatctcctgaagattgcttgtagcaaggtccgtggtcctgtcagtggaagcccggatagcatgaatgcctctcgacttagccagcctgggcagctgatgtctcagccctccacggcctccaacagcttacctgagccagccaagaagagtgaagaactggtggctgaagcacataacctctgcaccctgctagaaaatgccatacaggacactgtgagggaacaagaccagagtttcacggccctagactggagctggttacagacggaagaagaagagcacagctgcctggagcaggcctcatgatgtggggggactcgaccccctgacatggggcagcccatagcaggccttgtgcagtggggggactcgaccccctgacatggggctgcctggagcaggccgcgtgacgtggggctgcctggccgcggctctcacatggtggttcctgctgcactgatggcccaggggtctctggtatccagatggagctctcgcttcctcagcagctgtgactttcacccaggacccaggacgcagccctccgtgggcactgccggcgccttgtctgcacactggaggtcctccattacagaggcccagcgcacatcgctggccccacaaacgttcaggggtacagccatggcagctccttcctctgccgtgagaaaagtgcttggagtacggtttgccacacacgtgactggacagtgtccaattcaaatctttcagggcagagtccgagcagcgcttggtgacagcctgtcctctcctgctctccaaaggccctgctccctgtcctctctcactttacagcttgtgtttcttctggattcagcttctcctaaacagacagtttaattatagttgcggcctggccccatcctcacttcctctttttatttcactgctgctaaaattgtgtttttacctactactttggtggttgtcctcttttcggcaaagttggagcgagtgccaagctctccatctgtggtcctttctgccaagagcgactcatagtaaccaggatgggagagcagctgccttattctgaatcccaaaaattacttgggggtgattgtcacagaggagggacagaaagggtatctgctgaccaccagcctgcctacccatgcccatgtctccattcctgctcaagcgtgtgtgctgggccggggagtccctgtctctcacagcatctagcagtattattaaatggattcattttaaaaatagctcctatattttgtaacatgtctcaaacactcatactgggttccacaatccactgttagaatacctatggttagggcttctgaactaaaataatggaaaattttaacaatttgtatagtgcctggatcattactagtgccataaccctgcttcttcaacatttcacagaacttctcttttatataaaggcaagagcacaaaatgagttcagatgatcacaaacaggtgagttttgttggagaagaaagttggagtaggagactttcacaagtggtttccatggagatagaatgaagcattctgtggtcaagtaagtttagggagctattcatgtttcacttgctttgtggagattcacactatgcactgggaaagtatctgaaaagtcttataataaagaaacaggcttaactttgtgtaagaacactgtttatcaatgtcatttggctatagaaacattttctcctgctgattgtgtgtgtgaaacatgtattaacattccaatgaactagcatttaataaagcacaattttgg

SEQ ID NO: 565 - DNA, 462 bp, Homo sapiens
  modified_base (422)..(422): a, c, t or g
  modified_base (439)..(439): a, c, t or g
tttttttacatgtctattttttattcaatatattaaatatattaatcagaaaagtcacatactataaatccaggaaaatacacaaatataaatgtcagaatctgtcatttgtcttcttcctagagtgacagtttatgtacatgtggaaggagggtaggaagagagagccagcaggaggctggaaaggctgcccaggaaggcggggccatcccttcctcccagccccgctcccacctcaagctctttcttcctgtatttacagcagcactgggcttatttacagcacggcgctatgtgttaaaaacggtttatcttacaaaaaacataaaggccggggcaaggctgggggggataagacaaatcgtggggtcaccccatgaaggcatccccctccccaagggcttgagctccctgcaaacctnctggagcaggtgagaangtggagtcattctgcagctcaag

SEQ ID NO: 566 - DNA, 448 bp, Homo sapiens
  modified_base (17)..(17): a, c, t or g
  modified_base (305)..(305): a, c, t or g
  modified_base (417)..(417): a, c, t or g
  modified_base (422)..(422): a, c, t or g
  modified_base (430)..(430): a, c, t or g
acacaggagagtttganaccttcctctaccagctgccaggaacagtccagccatgctcctcagcctcctcctcggcctcctccacatcctcgtcctcagccacctcccctgcctctgcctccttcaagttcgaggacttccaggtgtacggctgctaccccggccccctgagcggcccagtggatgaggccctgtcctccagtggctctgactactatggcagcccctgctcggccccgtcgccctccacgcccagcttccagccgccccagctctctccctggctttgctgagctgtcaccggntgaccaggacctgttgctggagtcggccttcctggagctcttcatcctccggctggcgtacaggtctaagccaggcgaggggcaagtcatcttcttgttcaaggcctggtgntaaancgggttgnagtttgcccgtgggtttc

SEQ ID NO: 567 - DNA, 2699 bp, Homo sapiens
ggagcgcttaagaggagggtcgggctcggccggggagtcccagtggcggaggctacgaaacttgggggagtgcacagaagaacttcgggagcgcacgcgggaccagggaccaggctgagactcggggcgccagtccgggcaggggcagcgggagccggccgggtagggtgcagcctgaggcttgttcagcagaacaggtgcaagccacattgttgccaagacctgcctgaagccggattctccccactgcctccttcaaccccgcctcttcctcctcctgtgggactgctcccccctcctgtgaggctagatagatgccctgtatccaagcccaatatgggacaccagcaccgagtccgggaccccgtgaccacctggcaagcgaccccctgacccctgagttcatcaagcccaccatggacctggccagccccgaggcagcccccgctgcccccactgccctgcccagcttcagcaccttcatggacggctacacaggagagtttgacaccttcctctaccagctgccaggaacagtccagccatgctcctcagcctcctcctcggcctcctccacatcctcgtcctcagccacctcccctgcctctgcctccttcaagttcgaggacttccaggtgtacggctgctaccccggccccctgagcggcccagtggatgaggccctgtcctccagtggctctgactactatggcagcccctgctcggccccgtcgccctccacgcccagcttccagccgccccagctctctccctgggatggctccttcggccacttctcgcccagccagacttacgaaggcctgcgggcatggacagagcagctgcccaaagcctctgggcccccacagcctccagccttcttttccttcagtcctcccaccggccccagccccagcctggcccagagccccctgaagttgttcccctcacaggccacccaccagctgggggagggagagagctattccatgcctacggccttcccaggtttggcacccacttctccacaccttgagggctcggggatactggatacacccgtgacctcaaccaaggcccggagcggggccccaggtggaagtgaaggccgctgtgctgtgtgtggggacaacgcttcatgccagcattatggtgtccgcacatgtgagggctgcaagggcttcttcaagcgcacagtgcagaaaaacgccaagtacatctgcctggctaacaaggactgccctgtggacaagaggcggcgaaaccgctgccagttctgccgcttccagaagtgcctggcggtgggcatggtgaaggaagttgtccgaacagacagcctgaaggggcggcggggccggctaccttcaaaacccaagcagcccccagatgcctcccctgccaatctcctcacttccctggtccgtgcacacctggactcagggcccagcactgccaaactggactactccaagttccaggagctggtgctgccccactttgggaaggaagatgctggggatgtacagcagttctacgacctgctctccggttctctggaggtcatccgcaagtgggcggagaagatccctggctttgctgagctgtcaccggctgaccaggacctgttgctggagtcggccttcctggagctcttcatcctccgcctggcgtacaggtctaagccaggcgagggcaagctcatcttctgctcaggcctggtgctacaccggctgcagtgtgcccgtggcttcggggactggattgacagtatcctggccttctcaaggtccctgcacagcttgcttgtcgatgtccctgccttcgcctgcctctctgcccttgtcctcatcaccgaccggcatgggctgcaggagccgcggcgggtggaggagctgcagaaccgcatcgccagctgcctgaaggagcacgtggcagctgtggcgggcgagccccagccagccagctgcctgtcacgtctgttgggcaaactgcccgagctgcggaccctgtgcacccagggcctgcagcgcatcttctacctcaagctggaggacttggtgccccctccacccatcattgacaagatcttcatggacacgctgcccttctgacccctgcctgggaacacgtgtgcacatgcgcactctcatatgccaccccatgtgcctttagtccacggacccccagagcacccccaagcctgggcttgagctgcagaatgactccaccttctcacctgctccaggaggtttgcagggagctcaagcccttggggagggggatgccttcatgggggtgaccccacgatttgtcttatcccccccagcctggccccggcctttatgttttttgtaagataaaccgtttttaacacatagcgccgtgctgtaaataagcccagtgctgctgtaaatacaggaagaaagagcttgaggtgggagcggggctgggaggaagggatgggccccgccttcctgggcagcctttccagcctcctgctggctctctcttcctaccctccttccacatgtacataaactgtcactctaggaagaagacaaatgacagattctgacatttatatttgtgtattttcctggatttatagtatgtgacttttctgattaatatatttaatatattgaataaaaaatagacatgtagttggaaaaaaaaaaaaaaaaaaaaaaaaaaaaaaa

SEQ ID NO: 568 - DNA, 456 bp, Homo sapiens
  modified_base (308)..(308): a, c, t or g
  modified_base (319)..(319): a, c, t or g
  modified_base (341)..(341): a, c, t or g
  modified_base (381)..(381): a, c, t or g
  modified_base (427)..(427): a, c, t or g
  modified_base (440)..(440): a, c, t or g
tttttttttttttcagtagaaactgtacttcaaatattgaatttttattcaaaattctttataactttattacaatatagattttgtgttggatagttttgcccactgtaggctaatgtaagtgttctgagcatgtttaaggcaggctaggctaagctatgatgtttggtaggttaggtatattaaatacatttttgacttatgatcatattttcaacttatgatcatattttcaacttatgatgggtttatcaggatgcaaacccatcacataaatggaggggtgtctataaaacattgttagaccnataattttgcngttgattattgggaggtggtanggcacagtggttaggggcagaggccttgggagttgggacnacatgggttcaaatccccagcctgggccgttttcccgtgcagttcnaatcccggtctgncacaaacctgttgagt

SEQ ID NO: 569 - DNA, 424 bp, Homo sapiens
  modified_base (1)..(1): a, c, t or g
  modified_base (19)..(19): a, c, t or g
  modified_base (27)..(27): a, c, t or g
  modified_base (40)..(40): a, c, t or g
  modified_base (145)..(146): a, c, t or g
  modified_base (280)..(280): a, c, t or g
  modified_base (309)..(309): a, c, t or g
  modified_base (419)..(419): a, c, t or g
ngatgaatctggcttgacnttctgggnggctgatgggcantttactgagatggggcagcctggaagaggaacagaagcagggtcggggtggagggagaatactaaacttagcttgagacattttgcaatcaggaagctatatctnnagtgcttatgtgactcacctaaggccactcaacaagtttgtggcagaactggattagaactgcacagaaaacagccaagctgggatttgaacccatgtagtccaactccaaggcctctgcccctaaccactgtnccataccacctcccaataatcaacagcanaattataggtctaacaatgttttatagacacccctccatttatgtgatgggtttgcatcctgataaacccatcataagttgaaaatatgatccataagttgaaaatatgntcata

SEQ ID NO: 570 - DNA, 3317 bp, Homo sapiens
gctcttacgcggtctgtgggagaccggagcgggagacagcggtgacaggagcagcggccgggagcccttagggaggcagacagagcctgcagccaatgccccaggagccctcggttccaaccaactgatgcccctgtgcccactggcccacgccatgcagccccagtccgttctgcacagcggctacttccacccactacttcgggcctggcagacagccaccaccaccctcaatgcctccaacctcatctaccccatctttgtcacgccctgggcttggccaggcagggaagccagacactggatcccatcctcctcccaccatctccacttccatatttctttcctgcttcccaaccatccctctcagtcgcccccgcaccactggcccttcccacagctaccaatccatatcccacccccgctcttgcagggatgttcctgatgacatacagcctatcaccagcctcccaggagtggccaggtatggtgtgaagcggctggaagagatgctgaggcccttggtggaagagggcctacgctgtgtcttgatctttggcgtccccagcagagttcccaaggacgagcggggttccgcagctgactccgaggagtccccagctattgaggcaatccatctgttgaggaagaccttccccaacctcctggtggcctgtgatgtctgcctgtgtccctacacctcccatggtcactgcgggctcctgagtgaaaacggagcattccgggctgaggagagccgccagcggctggctgaggtggcattggcgtatgccaaggcaggatgtcaggtggtagccccgtcggacatgatggatggacgcgtggaagccatcaaagaggccctgatggcacatggacttggcaacagggtatcggtgatgagctacagtgccaaatttgcttcctgtttctatggccctttccgggatgcagctaagtcaagcccagcttttggggaccgccgctgctaccagctgccccctggagcacgaggcctggctctccgagctgtggaccgggatgtacgggaaggagctgacatgctcatggtgaagccgggaatgccctacctggacatcgtgcgggaggtaaaggacaagcaccctgacctccctctcgccgtgtaccacgtctctggagagtttgccatgctgtggcatggagcccaggccggggcatttgatctcaaggctgccgtactggaggccatgactgccttccgcagagcaggtgctgacatcatcatcacctactacacaccgcagctgctgcagtggctgaaggaggaatgatggagacagtgccaggcccaagaactagaactttaaaacgttcccggggcctcagacaagtgaaaaccaaagtaaatgctgcttttagaactgtgccctcatgccctcttcctgctcacatgctagcggggcccagcagccctgggtggttttgccagcatgctaactcttgtaactcgcagctgcatcctatgagctctcccaagcttccccgcccctcccctgggtcagccgtgaggcccacctttgccaccctcagctctttcctctggtgtggcttcagcttgaaagcaacctggagtcgggggcacagcctttggggcctggctgggagagggtcttggagcattaggggaagaagagagcagtgggatcttggggcctgagaagccttggaacgcttctggcagcagagctgggtgtgggaatgaggcctagatcgatatccctgggttagagttgaaatttgccgcaattccactggaaggcatttcccacgaggccagaggttgccaggctgcctgaggtctcctattctactctgaaccataaacccagagaagaattactcattaaccagcataaatactgcctgaggatcaaaactcagaggcaaagagggagttcctgactgctagaggtgccaccaccacaaacactttttattcaggagatactttttgagaatctctgctctgttcctaggttcagtgctgggtcctgggaatacagcaggacagacctcagcttatctcttcatagaaattatacaaagagaattggggagacagctaagaagaaaacaaagaaataaagcagttacaaattgtgataagtgctttgaaggaaagaaggggtctgagacaacaacagggaaggggcctctcttgaaacagtagttgggaaggaggcagacatgcaccagtgatgtggtgacaggtgctctgaaggaggtcaccaggacctgacctctttgaaggatcagaaaatacttccctgaaggactgacatttgagcctagacctgaagggtgagccatcaagctaagacaattggggaagagcattccagggagagggaggagttgtgcaaaggccctggggctccttctagctggaggaatgcaaggctagcttgtctggagcactgagaggatggcctgaactgagtggagagagacagaccaggaccaaaccatgcagaggtcaagggccacattcaccttttcagagtgactcaatcaaatttgtagtttgtaaaagtattttaacagctctgcggcaaagtgcaaatgaaaagtcttgatggcatggactggagcggggacagtggggatggagaaaggggaatggattgtggatgtgtttagaaggtagattcgatgtgaaggatgaatctggcttgaccttctgggtggctgatgggccatttactgagatggggcagcctggaagaggaacagaagcagggtcggggtggagggagaatactaaacttagcttgagacattttgcaataaggaagctatatctagagtgcttatgtgactcacctaaggccactcaacaagtttgtggcagaactggattagaactgcacagaaaacagccaagctgggatttgaacccatgtagtccaactccaaggcctctgcccctaaccactgtgccataccacctcccaataatcaacagcaaaattataggtctaacaatgttttatagacacccctccatttatgtgatgggtttgcatcctgataaacccatcataagttgaaaatatgatcataagttgaaaatatgatcataagtcaaaaatgtatttaatatacctaacctaccaaacatcatagcttagcctagcctgccttaaacatgctcagaacacttacattagcctacagtgggcaaaactatccaacacaaaatctatattgtaataaagttgtaaagaattttgaataaaaattcaatatttgaagtacaaaaaaaaaaaaaaaaa

SEQ ID NO: 571 - DNA, 310 bp, Homo sapiens
  modified_base (293)..(293): a, c, t or g
ttttttccaagtacaattttttaataaagataattacaaaagatggaaaaatcagctcagaaaggccaattacttctttaatagatcagtttttttgacataataactcacatcaattttaaatactatcacataaagcatggtggagaaaagaaattttgcttcataattagaaaaactcacaataaaacttgccaagaaaaacaaaaacgaaaaagccatttgaaaataaatacagtccatgccaaagtagtataaaatgaagccagaagtcttcaaaaggaaaacatttnccttccataatttcctt

SEQ ID NO: 572 - DNA, 457 bp, Homo sapiens
  modified_base (300)..(300): a, c, t or g
  modified_base (306)..(306): a, c, t or g
  modified_base (375)..(375): a, c, t or g
  modified_base (449)..(449): a, c, t or g
tgtgcgtgcagactcattatctggtgatagactgggttgtttcaatctaacagtcaaaggtcatgctaaatgtgtagaagttgtaaaaacttttaacttaccattactgatgcttggaggaggtggctacacaatccgtaatgttgctcgatgttggacatatgagactgcagttgcccttgattgtgagattcccaatgagttgccatataatgattactttgagtattttggaccagacttcaaactgcatattagtccttcaaacatgacaaaccagaacactccagaatatatggnaaaagnttaaaccaggggtttgttttgaaaaatttgccgcatgttacctcattgcacctgggtgtccagattgcnagctattccagaagatgctggttccatggaagaccagtggagatggaagatgggagaagatccagaccaagagnatttccta

SEQ ID NO: 573 - DNA, 1985 bp, Homo sapiens
cgccgagctttcggcacctctgccgggtggtaccgagccttcccggcgccccctcctctcctcccaccggcctgcccttccccgcgggactatcgcccccacgtttccctcagcccttttctctcccggccgagccgcggcggcagcagcagcagcagcagcagcaggaggaggagcccggtggcggcggtggccggggagcccatggcgtacagtcaaggaggcggcaaaaaaaaagtctgctactactacgacggtgatattggaaattattattatggacagggtcatcccatgaagcctcatagaatccgcatgacccataacttgctgttaaattatggcttatacagaaaaatggaaatatataggccccataaagccactgccgaagaaatgacaaaatatcacagtgatgagtatatcaaatttctacggtcaataagaccagataacatgtctgagtatagtaagcagatgcatatatttaatgttggagaagattgtccagcgtttgatggactctttgagttttgtcagctctcaactggcggttcagttgctggagctgtgaagttaaaccgacaacagactgatatggctgttaattgggctggaggattacatcatgctaagaaatacgaagcatcaggattctgttacgttaatgatattgtgcttgccatccttgaattactaaagtatcatcagagagtcttatatattgatatagatattcatcatggtgatggtgttgaagaagctttttatacaacagatcgtgtaatgacggtatcattccataaatatggggaatactttcctggcacaggagacttgagggatattggtgctggaaaaggcaaatactatgctgtcaattttccaatgtgtgatggtatagatgatgagtcatatgggcagatatttaagcctattatctcaaaggtgatggagatgtatcaacctagtgctgtggtattacagtgtggtgcagactcattatctggtgatagactgggttgtttcaatctaacagtcaaaggtcatgctaaatgtgtagaagttgtaaaaacttttaacttaccattactgatgcttggaggaggtggctacacaatccgtaatgttgctcgatgttggacatatgagactgcagttgcccttgattgtgagattcccaatgagttgccatataatgattactttgagtattttggaccagacttcaaactgcatattagtccttcaaacatgacaaaccagaacactccagaatatatggaaaagataaaacagcgtttgtttgaaaatttgcgcatgttacctcatgcacctggtgtccagatgcaagctattccagaagatgctgttcatgaagacagtggagatgaagatggagaagatccagacaagagaatttctattcgagcatcagacaagcggatagcttgtgatgaagaattctcagattctgaggatgaaggagaaggaggtcgaagaaatgtggctgatcataagaaaggagcaaagaaagctagaattgaagaagataagaaagaaacagaggacaaaaaaacagacgttaaggaagaagataaatccaaggacaacagtggtgaaaaaacagataccaaaggaaccaaatcagaacagctcagcaacccctgaatttgacagtctcaccaatttcagaaaatcattaaaaagaaaatattgaaaggaaaatgttttctttttgaagacttctggcttcattttatactactttggcatggactgtatttattttcaaatgggactttttcgtttttgtttttctgggcaagttttattgtgagattttctaattatgaagcaaaatttcttttctccaccatgctttatgtgatagtatttaaaattgatgtgagttattatgtcaaaaaaactgatctattaaagaagtaattggcctttctgagctgaaaaaaaaaaaaaaaaag

SEQ ID NO: 574 - DNA, 529 bp, Homo sapiens
  modified_base (33)..(33): a, c, t or g
  modified_base (199)..(199): a, c, t or g
  modified_base (501)..(501): a, c, t or g
tttttttttttcactcaggcctcagaatgactngactttattggaagctattctgacatcactttccagactgtctcactgtcttgggaccaggcatgggaggcaggggtgggaatcttcttgtgattgtgggtggtggctggaggagtggagtggtgggaggcggctcagtcgcgggcactcctgcgactggcggatncggtccggatggaataagccttcaggaagcccaggacccgcactgctggagaagctcagggcattgctgcccaatggttcccccgagggtcagcccaatgccaccgccacttgctactgccaccagtggaattcatcacagagatattcacggctcccactccatctccagccaaccggctctcctcgccctccagcagcttgcggtaggtggcgatctcgatgtccagggccagcttcacgctcatgagttcctggtactcacgcagctgccgtgccatatcctgcttgccccgcttgcanggcggcttccagctcctcctgctttggc

SEQ ID NO: 575 - DNA, 443 bp, Homo sapiens
  modified_base (16)..(16): a, c, t or g
  modified_base (28)..(28): a, c, t or g
  modified_base (38)..(39): a, c, t or g
  modified_base (41)..(41): a, c, t or g
  modified_base (358)..(358): a, c, t or g
gcgggccgcctggagncgctcgcaggantcgcacgganntntgtggaggacttcaagaataagtacgaagatgaaattaaccaccgcacagctgctgagaatgagtttgtggtgctgaagaaggatgtggatgctgcctacatgagcaaggtggagctggaggccaaggtggatgccctgaatgatgagatcaacttcctcaggaccctcaatgagacggattgacagagctgcagtcccagatctccgacacatctgtggtgctgtccatggacaacagtcgctccctggacctggacggcatcatcgctgaggtcaaggcgcagtatgaggagattggccaaatgcagccgggctnaggctgaagcttgggtaccagaccaagttttgagaccctccaggcccaggctggggaagatgggggacgacctccggaatacccg

SEQ ID NO: 576 - DNA, 1753 bp, Homo sapiens
cagccccgcccctacctgtggaagcccagccgcccgctcccgcggataaaaggcgcggagtgtccccgaggtcagcgagtgcgcgctcctcctcgcccgccgctaggtccatcccggcccagccaccatgtccatccacttcagctccccggtattcacctcgcgctcagccgccttctcgggccgcggcgcccaggtgcgcctgagctccgctcgccccggcggccttggcagcagcagcctctacggcctcggcgcctcacggccgcgcgtggccgtgcgctctgcctatgggggcccggtgggcgccggcatccgcgaggtcaccattaaccagagcctgctggccccgctgcggctggacgccgacccctccctccagcgggtgcgccaggaggagagcgagcagatcaagaccctcaacaacaagtttgcctccttcatcgacaaggtgcggtttctggagcagcagaacaagctgctggagaccaagtggacgctgctgcaggagcagaagtcggccaagagcagccgcctcccagacatctttgaggcccagattgctggccttcggggtcagcttgaggcactgcaggtggatgggggccgcctggaggcggagctgcggagcatgcaggatgtggtggaggacttcaagaataagtacgaagatgaaattaaccaccgcacagctgctgagaatgagtttgtggtgctgaagaaggatgtggatgctgcctacatgagcaaggtggagctggaggccaaggtggatgccctgaatgatgagatcaacttcctcaggaccctcaatgagacggagttgacagagctgcagtcccagatctccgacacatctgtggtgctgtccatggacaacagtcgctccctggacctggacggcatcatcgctgaggtcaaggcgcagtatgaggagatggccaaatgcagccgggctgaggctgaagcctggtaccagaccaagtttgagaccctccaggcccaggctgggaagcatggggacgacctccggaatacccggaatgagatttcagagatgaaccgggccatccagaggctgcaggctgagatcgacaacatcaagaaccagcgtgccaagttggaggccgccattgccgaggctgaggagcgtggggagctggcgctcaaggatgctcgtgccaagcaggaggagctggaagccgccctgcagcggggcaagcaggatatggcacggcagctgcgtgagtaccaggaactcatgagcgtgaagctggccctggacatcgagatcgccacctaccgcaagctgctggagggcgaggagagccggttggctggagatggagtgggagccgtgaatatctctgtgatgaattccactggtggcagtagcagtggcggtggcattgggctgaccctcgggggaaccatgggcagcaatgccctgagcttctccagcagtgcgggtcctgggctcctgaaggcttattccatccggaccgcatccgccagtcgcaggagtgcccgcgactgagccgcctcccaccactccactcctccagccaccacccacaatcacaagaagattcccacccctgcctcccatgcctggtcccaagacagtgagacagtctggaaagtgatgtcagaatagcttccaataaagcagcctcattctgaggcctgagtgatccacgtgaaaaaaaaaaaaaaaaaaaaaaaaaaaaaaaaaaaaaaaaaaaaaaaaaaa

SEQ ID NO: 577 - DNA, 388 bp, Homo sapiens
  modified_base (240)..(240): a, c, t or g
  modified_base (295)..(295): a, c, t or g
  modified_base (313)..(313): a, c, t or g
  modified_base (321)..(321): a, c, t or g
  modified_base (342)..(342): a, c, t or g
  modified_base (349)..(349): a, c, t or g
  modified_base (359)..(359): a, c, t or g
  modified_base (370)..(370): a, c, t or g
  modified_base (384)..(384): a, c, t or g
atttttaaaactttattttaaaaatatgagcatctattttaaaagttttgataattattgccattattttcttgtgattggtacaatttaaaaataagtctatgttttcacattgattttaaaaaatatagcatgtttcgaattacaaatgattaagcaaactctattacttcatagctgaccatcttccagaaaattcccacttaattgaatacttagaaaaaaatcggccagtgcgantctgaaaggtatattaaaattaagggcagttttaattctgaagacaaatatcttncatcggaaatctatttgnaagcttcngagatttgctgccgaaagtcnacagtcngtggaatatnccaattccccntttacaaccggatngccg

SEQ ID NO: 578 - DNA, 441 bp, Homo sapiens
  modified_base (316)..(316): a, c, t or g
  modified_base (321)..(321): a, c, t or g
  modified_base (331)..(331): a, c, t or g
  modified_base (339)..(339): a, c, t or g
  modified_base (375)..(375): a, c, t or g
  modified_base (420)..(420): a, c, t or g
aaagaagcttgcttcccctacacaggcactgattctccatgcaaaatgaaggaagactgctttcgttattactcctctgagtaccactatgtaggaggtttctatggaggctgcaatgaagccctgatgaagcttgagttggtccatcatgggcccatggagttgcttttgaagtatatgatgacttcctccactacaaaaaggggatctaccaccacactggtctaagagaccctttcaacccctttgagctgactaatcatgctgttctgcttgtgggctatggcactgactcagcctctgggatggattactngaatngtaaaaaacngctggggnaccggcttggggtgaagaatgggctacttccggatncgcagaaggaacttgatgagtgtgcaattgagagcatagcagtgngcagccacaccaatttcctaa

SEQ ID NO: 579 - DNA, 1913 bp, Homo sapiens
  modified_base (1906)..(1906): a, c, t or g
  modified_base (1912)..(1912): a, c, t or g
agctatttcaaggcgcgcgcctcgtggtggactcaccgctagcccgcagcgctcggcttcctggtaattcttcacctcttttctcagctccctgcagcatgggtgctgggccctccttgctgctcgccgccctcctgctgcttctctccggcgacggcgccgtgcgctgcgacacacctgccaactgcacctatcttgacctgctgggcacctgggtcttccaggtgggctccagcggttcccagcgcgatgtcaactgctcggttatgggaccacaagaaaaaaaagtagtggtgtaccttcagaagctggatacagcatatgatgaccttggcaattctggccatttcaccatcatttacaaccaaggctttgagattgtgttgaatgactacaagtggtttgccttttttaagtataaagaagagggcagcaaggtgaccacttactgcaacgagacaatgactgggtgggtgcatgatgtgttgggccggaactgggcttgtttcaccggaaagaaggtgggaactgcctctgagaatgtgtatgtcaacacagcacaccttaagaattctcaggaaaagtattctaataggctctacaagtatgatcacaactttgtgaaagctatcaatgccattcagaagtcttggactgcaactacatacatggaatatgagactcttaccctgggagatatgattaggagaagtggtggccacagtcgaaaaatcccaaggcccaaacctgcaccactgactgctgaaatacagcaaaagattttgcatttgccaacatcttgggactggagaaatgttcatggtatcaattttgtcagtcctgttcgaaaccaagcatcctgtggcagctgctactcatttgcttctatgggtatgctagaagcgagaatccgtatactaaccaacaattctcagaccccaatcctaagccctcaggaggttgtgtcttgtagccagtatgctcaaggctgtgaaggcggcttcccataccttattgcaggaaagtacgcccaagattttgggctggtggaagaagcttgcttcccctacacaggcactgattctccatgcaaaatgaaggaagactgctttcgttattactcctctgagtaccactatgtaggaggtttctatggaggctgcaatgaagccctgatgaagcttgagttggtccatcatgggcccatggcagttgcttttgaagtatatgatgacttcctccactacaaaaaggggatctaccaccacactggtctaagagaccctttcaacccctttgagctgactaatcatgctgttctgcttgtgggctatggcactgactcagcctctgggatggattactggattgttaaaaacagctggggcaccggctggggtgagaatggctacttccggatccgcagaggaactgatgagtgtgcaattgagagcatagcagtggcagccacaccaattcctaaattgtagggtatgccttccagtatttcataatgatctgcatcagttgtaaaggggaattggtatattcacagactgtagactttcagcagcaatctcagaagcttacaaatagatttccatgaagatatttgtcttcagaattaaaactgcccttaattttaatatacctttcaatcggccactggccatttttttctaagtattcaattaagtgggaattttctggaagatggtcagctatgaagtaatagagtttgcttaatcatttgtaattcaaacatgctatattttttaaaatcaatgtgaaaacatagacttatttttaaattgtaccaatcacaagaaaataatggcaataattatcaaaacttttaaaatagatgctcatatttttaaaataaagttttaaaaataactgcadnahmsans

SEQ ID NO: 580 - DNA, 358 bp, Homo sapiens
  modified_base (230)..(230): a, c, t or g
  modified_base (278)..(278): a, c, t or g
  modified_base (294)..(294): a, c, t or g
  modified_base (350)..(350): a, c, t or g
ttttttcgcttcaagttcattacgtttaatttttttccaaaaaagttttgcattgacagctgtacaatactttggtgttaactgtggtcttccttcacctcagtgaactctgccctgcccatctgtccagaggaagtcttagctcctaccccccaccctccctggcgcttggatgggaggcgacacagtatgggattgtgaaatccctgctgcgatgctgggtatctggnaggggaaaagggggtggaaacagcccagggaaatgctgttagatgagnagaactcacatcgatngggaaatgggccctggcccaaggctccagaatgtgacagcaacagtggcctggctngttttccc

SEQ ID NO: 581 - DNA, 455 bp, Homo sapiens
  modified_base (24)..(24): a, c, t or g
  modified_base (122)..(122): a, c, t or g
  modified_base (415)..(415): a, c, t or g
tgtgtgattccgtctgctgaggtngtgggaggggctccagggaaagccacccaccttcagtgaggttgctccccagctgagcgcaccgggcatgggatgtggaggctggcgacacaccctgngcctctccaaggctgggcgcgtggggcgtccagagtctctctgggtctcagatgtccatctgccacctcttgttaaggctctagcagaagggagggtgagggtagaagaaagttattcccgaagaaaaaaagaatgaaaagtcattgtacctgaactgtttttatatttttaaaagttactatttaaaggttggtttgattgttgcgtcttaattgcctctcctcccagtttgccagtcccgccccccgccccccgggaaaaacagccaggccactgttgctgtcacattctngagcctgggccagggccatttcccatcgatgtgagctctt

SEQ ID NO: 582 - DNA, 2357 bp, Homo sapiens
gaatcacgacccctccctgccatgtatccgcagggcagacatccggctccccatcaacccgggcagccgggatttaaattcacggtggctgagtcttgtgacaggatcaaagacgaattccagttcctgcaagctcagtatcacagcctcaaagtggagtacgacaagctggcaaacgagaagacggagatgcagcgccattatgtgatgtactatgagatgtcctatggcttgaacattgaaatgcacaagcagacagagattgcgaagagactgaacacaattttagcacagatcatgcctttcctgtcacaagagcaccagcagcaggtggcgcaggcagtggagcgcgccaagcaggtcaccatgacggagctgaacgccatcatcgggcagcagcagctccaggcgcagcacctctcccatgccacacacggccccccggtccagttgccaccccacccgtcaggtctccagcctccaggaatccccccagtgacagggagcagctccgggctgctggcactgggcgccctgggcagccaggcccatctgacggtgaaggatgagaagaaccaccatgaactcgatcacagagagagagaatccagtgcgaataactctgtgtcaccctcggaaagcctccgggccagtgagaagcaccggggctctgcggactacagcatggaagccaagaagcggaaggtggaggagaaggacagcttgagccgatacgacagtgatggagacaagagtgatgatctggtggtggatgtttccaatgaggaccccgcaacgccccgggtcagcccggcacactcccctcctgaaaatgggctggacaaggcccgtagcctgaaaaaagatgcccccaccagccctgcctcggtggcctcttccagtagcacaccttcctccaagaccaaagaccttggtcataacgacaaatcctccacccctgggctcaagtccaacacaccaaccccaaggaacgacgccccaactccaggcaccagcacgaccccagggctcaggtcgatgccgggtaaacctccgggcatggacccgataggtataatggcctcggctctgcgcacgcccatctccatcaccagctcctatgcggcgcccttcgccatgatgagccaccatgagatgaacggctccctcaccagtcctggcgcctacgccggcctccacaacatcccaccccagatgagcgccgccgccgctgctgcagccgctgcctatggccgatcgccaatggtgagctttggagctgttggttttgaccctcaccccccgatgcgggccacaggcctcccctcaagcctggcctccattcctggaggaaaaccagcgtactcattccatgtgagtgctgatgggcagatgcagcccgtgcccttcccccacgacgccctggcaggccccggcatcccgaggcacgcccggcagatcaacacactcagccacgggggggtggtgtgtgccgtgaccatcagcaaccccagcaggcacgtctacacaggtggcaagggctgcgtgaagatctgggacatcagccagccaggcagcaagagccccatctcccagctggactgcctgaacagggacaattacatgcgctcctgcaagctgcaccctgatgggcgcacgctcatcgtgggcggcgagggcagcacgctcaccatctgggacctggcctcgcccacgccccgcatcaaggccgagctgacgtcctcggctcccgcctgttatgccctggccattagccctgacgccaaagtctgcttctcctgctgcagcgatgggaacattgctgtctgggacctgcacaaccagaccctggtcaggcagttccagggccacacagatggggccagctgcatagacatctcccatgatggcaccaaactgtggacagggggcctggacaacacggtgcgctcctgggacctgcgggagggccgacagctacagcagcatgacttcacttcccagatcttctcgctgggctactgccccactggggagtggctggctgtgggcatggagagcagcaacgtggaggtgctgcaccacaccaagcctcacaagtaccagctgcacctgcacgagagctgcgtgctctccctcaagttcgcctactgcggcaagtggttcgtgagcactgggaaagataaccttctcaacgcctggaggacgccttatggagccagcatatcccagtctaaagaatcctcgtctgtcttgagttgtgacatttcagcggatgacaaatacattgtaacaggctctggtgacaagaaggccacagtttatgaggtcatctactaaacaagaactccagcagg

SEQ ID NO: 583 - DNA, 448 bp, Homo sapiens
  modified_base (310)..(310): a, c, t or g
  modified_base (388)..(388): a, c, t or g
  modified_base (406)..(406): a, c, t or g
  modified_base (433)..(433): a, c, t or g
ttttttttgcgtgtaaaatatgttttattgttctttaaaagggttcagggtttggttttaaatcaggctgcacacctttcaaatcaatctgacatctctctatgtcaaactggcttcagctagcaatacttcattaaatcgaaaagaaaaaaattcgctttaaggaaaaaaaatccagttttaagaacaattaacattagtctttaaaataaaaggagggctaatgtttcatgttgctttatacatccttctcctcaatacagaaccaggaatgtaattttcctaactcaggcaggcactgatactgatnggacactgcgcgtgcacacacacacacacacacatacacacacacacacacacacacacacacaccccctccccccanacaagcaaaattcagagntatgtcaaaggggaaaaggttttgttnattggtatttggggg

SEQ ID NO: 584 - DNA, 461 bp, Homo sapiens
  modified_base (253)..(255): a, c, t or g
  modified_base (445)..(445): a, c, t or g
  modified_base (453)..(453): a, c, t or g
  modified_base (461)..(461): a, c, t or g
gtagattctctcctctcccatcccagaaaacaaaacaaaataatgcttttcgaaattgtttctaggactttaaaacataatggtatatccaaaattctttatttcagaatgcaacaatagattccattaatatagactcaagatcaaaacagcatacctgctaagctaagatagatggtgttgattccactgggttttgatcaatacaataacaaacctttttcctttgacatactctgaattttgttgtttnnngggagggggtgtgtgtgtgtgtgtgtgtgtgtgtgtgtatgtgtgtgtgtgtgtgtgtgcacgcgcagtgtccatcagtatcagtgcctgcctgagttaggaaaattacattcctgggttctgtattgaggagaaggatgtataaagcaacatgaaacattagccctccttttattttaaagactaatgnttaattgntcttaaan

SEQ ID NO: 585 - DNA, 3925 bp, Homo sapiens
agcggggctgcgcgaagtcatcgctgttccagacagcgatgactcgagagcggtgggggtggcggcgcgatcggccgggctgtaaccgtcgtctgtccgggagcggctggagcggcagcggcggccgggcacggcgcgaggtgacgccacagggcagcggcggcagcggaggcagcggcggcagcaggagacgcagcggcggccgcagcagcagcagcaagacggactcgtggagacgcgccgccgccgccgccgccgggccgggccgggtgtcgcgcgccgaggctgggggggagtcgtcgccgccgccgccaccgctaccgccgccgccgccgccgccgaggtgactgaggagagaggcgcctcctcgctcccgccaccgccggacttcaatgcccagtccccagctcgccagcgtttttcgttggaatatacgttgcacatttatggcgattctgagtgtgagggcagacttctgccaggctcagcacagcattttcgctgacaagtgagcttggaggttctatgtgccataattaacattgccttgaagactcctggacaccgagactggcctcagaaatagttggcttttttttttttttaattgcaagcatatttcttttaatgactccagtaaaattaagcatcaagtaaacaagtggaaagtgacctacacttttaacttgtctcactagtgcctaaatgtagtaaaggctgcttaagttttgtatgtagttggattttttggagtccgaatatttccatctgcagaaattgaggcccaaattgaatttggattcaagtggattctaaatactttgcttatcttgaagagagaagcttcataaggaataaacaagttgaatagagaaaacactgattgataataggcattttagtggtctttttaatgttttctgctgtgaaacatttcaagatttattgatttttttttttcactttccccatcacactcacacgcacgctcacactttttatttgccataatgaaccgtccagcccctgtggagatctcctatgagaacatgcgttttctgataactcacaaccctaccaatgctactctcaacaagttcacagaggaacttaagaagtatggagtgacgactttggttcgagtttgtgatgctacatatgataaagctccagttgaaaaagaaggaatccacgttctagattggccatttgatgatggagctccaccccctaatcagatagtagatgattggttaaacctgttaaaaaccaaatttcgtgaagagccaggttgctgtgttgcagtgcattgtgttgcaggattgggaagggcacctgtgctggttgcacttgctttgattgaatgtggaatgaagtacgaagatgcagttcagtttataagacaaaaaagaaggggagcgttcaattccaaacagctgctttatttggagaaataccgacctaagatgcgattacgcttcagagataccaatgggcattgctgtgttcagtagaaggaaatgtaaacgaaggctgacttgattgtgccatttagagggaactcttggtacctggaaatgtgaatctggaatattacctgtgtcatcaaagtagtgatggattcagtactcctcaaccactctcctaatgattggaacaaaagcaaacaaaaaagaaatctctctataaaatgaataaaatgtttaagaaaagagaaagagaaaaggaattaattcagtgaaggatgattttgctcctagttttggagtttgaatttctgccaggattgaattattttgaaatctcctgtctttttaaactttttcaaaataggtctctaaggaaaaccagcagaacattaggcctgtgcaaaaccatctgtttggggagcacactcttccattatgcttggcacatagatctccctgtggtgggattttttttttccctttttttgtgggggagggttggtggtatatttttcccctcttttttccttcctctcctacatctcccttttcccccgatccaagttgtagatggaatagaagcccttgttgctgtagatgtgcgtgcagtctggcagccttaagcccacctgggcacttttagataaaaaaaaaaaaaaacaaaaaacaacaccaaaaaaacagcagtgatatatatattccaggtggtttttagtctttactgatgaaagggtgttcatgttagtttcttcaaaaccctatctaatactaggcaaagtagccaagagccttttgttttgtttttattttgataaattagtggagaaatggcattttaagaggagtctcttctcaacttacctgagagtcgaattcttctcttccctaaccaatgaagctaagtggttatcccagaaacttgtcttctaaaagggaggactccaggccatcaataaagatgtccaggcagtgagcgtactttttacaccctgtagaattgtgggctgtagcgttactctgattttctgtctagtatcagagaatgctggtagcttaaaatttttattttaggacttgtactctgaattttcaggaaccgtcaaaggagcagcagcaaattcacatattttcgacttgagaaatgcttgtggtatgtgttttccaaactgccccctatatgtaaagttcagtttaaccactgattgccttgttattactaggttttttgagattaaaaaaaaaaaatccctggtttaaaaccaacaatgatgcctagtgagtatgtgtccacaggccataacagggtagaagagagacatcgtgcaacccaatgagtagtgaagggactgtgttgcttgtgaagcggtgtagtagcatttttgcagattcttggctgggtttagtgtactgatctagaaaagctgtttttctgctcctttgtggaaggcagttatgatcaggctgcatggacaaagcaggtagaggggcaccatcaggggctcttgcactattttcacctctaaatattacgtactcagtagtgccctgcttctagggctctgaatacgggcttaaagtcatcttgtcctgctggaatttgctgtgcagagccataagcctcccattttgttagcgtcagctaggccaataggaacagaccgggaccttgtctcacactgatgatacctcacatgttgaccggctatgtgaactgcctatttcctatgctggagttttgatttttaactaaacgcaaatctgtagattctctcctctcccatcccagaaaacaaaacaaaataatgcttttcgaaattgtttctaggactttaaaacataatggtatatccaaaattctttatttcagaatgcaacaatagattccattaatatagactcaagatcaaaacagcatacctgctaagctaagatagatggtgttgattccactgggttttgatcaatacaataacaaacctttttcctttgacatactctgaattttgttgtttggggggagggggtgtgtgtgtgtgtgtgtgtgtgtgtgtgtattgtgtgtgtgtgtgtgtgcacgcgcagtgtccatcagtatcagtgcctgcctgagttaggaaaattacattcctggttctgtattgaggagaaggatgtataaagcaacatgaaacattagccctccttttattttaaagactaatgttaattgttcttaaaactggattttttttccttaaagcaatttttttcttttcgatttaatgaagtattgctagctgaagccagtttgacatagagagatgtcagattgatttgaaaggtgtgcagcctgatttaaaaccaaaccctgaacccttttaaagaacaataaaacatattttacacgctcaaaaaaaaaaaaaaaaaaaaaaaaaaaaaaaaaaaaaaaaaaaaaaaaaaaaaaaaaaaaaaaaaaa

SEQ ID NO: 586 - DNA, 437 bp, Homo sapiens
  modified_base (339)..(339): a, c, t or g
  modified_base (436)..(436): a, c, t or g
tttttttttttttttttttttttttttttggaaaaactgtgaaaaatatatctgaatttattaagtacagtataaaacagggttgtggcaacagaaagtaaaaactaacatggattgctataaatatgctgaagcctagttgttcaaatgatacaattctctcatgctactctaaagtttataaagaaaaaggatttacactttacacactgtacacaaaaggaataccttctgagagccagggagtggggaaaggggaaggagacttgacgtcaagggtgcttttgaggaacatgacgggccagccagcctgccccaactttgaggccctgctgggtncttagtgactataaatatactgtctatttctaatgcaatccgtctttcctgaaagatcttgttatcttttactattgagacatgctttcatttttgng

SEQ ID NO: 587 - DNA, 463 bp, Homo sapiens
cagaaggatgtcccgggtgtgtacacaaggttaccaactacctagactggattcgtgacaacatgcgaccgtgaccaggaacacccgactcctcaaaagcaaatgagatcccgcctcttcttcttcagaagacactgcaaaggcgcagtgcttctctacagacttctccagacccaccacaccgcagaagcggaacgagaccctacaggagagggaagagtgcattttcccagatacttcccattttggaagttttcaggacttggtctgatttcaggatactctgtcagatgggaagacatgaatgcacactagcctctccaggaatgcctcctccctgggcagaaagtggccatgccaaccttgttttcagctaaagcccaacctcctgacctgtcaccgtgagcagctttgggaaacaggaccacaaaaatgaaagcatgtctcaattagtaaaagatta

SEQ ID NO: 588 - DNA, 418 bp, Homo sapiens
  modified_base (327)..(327): a, c, t or g
  modified_base (344)..(344): a, c, t or g
  modified_base (391)..(391): a, c, t or g
ttttttttttgccattattttgatttattgcattctgaagtactccggggggagggcctgagaacgatccgctttatcagcagttctaaagccttattacctgagatttatattctggggggaaaaatcaagattggattatcaatacgtatttcacaggagatttgagttttggccctgacagaagaacacgtactaacctggaaaaaggctacgtgagattaaagagagaaacagctaaacaccaaatcctgggtgaggagagacgtcgatttaaaagggccagccacttcactgtaggcgtgacaactccctctggggtagccngggaggcagagcttganccactgggcatggggagccttggggccacgaggggccaccttccccngggggccccacaggcaggcccagggga

SEQ ID NO: 589 - DNA, 476 bp, Homo sapiens
  modified_base (325)..(325): a, c, t or g
  modified_base (346)..(346): a, c, t or g
  modified_base (363)..(363): a, c, t or g
  modified_base (411)..(411): a, c, t or g
  modified_base (472)..(472): a, c, t or g
aaaaacatcagctgcagatcttgtgacagaaacagatcaccttgtggaagatttaattatttctgagttgcgagagaggtttccttcacacaggttcattgcagaagaggccgcggcttctggggccaagtgtgtgctcacccacagcccgacgtggatcatcgaccccatcgacggcacctgcaattttgtgcacagattcccgactgtggcgttagcattggatttgctgttcgacaagagcttgaattcggagtgatttaccactgcacagaggagcggctgtacacggggcccgccgggttcgggggcgccttctgcaatnggccagcggttccgggttttncgggggagacagatttntcaaaggcctttggttcttgaacagaaatttgggccccaaacgttgancctggcgaacctggaaggttttttcctgaagtaaacattggaagccggttttttgattgcncaag

SEQ ID NO: 590 - DNA, 1500 bp, Homo sapiens
cggagggtggggagcggaaagcaggacgcacggctcccgcggcccgctggctgcccttcccgccagcgcaggtgtgggacgggcggcggactaggcacagagctgcgggagcaggcacagggagtgtggagcctggcggcgggacggcgggatccggtgggagccggagtcccgccgaggggggctggaggtggaggggcccggcgaggccgcgatgaagccgagcggcgaggaccaggcggcgctggcggccggcccctgggaggagtgcttccaggcggccgtgcagctggcgctgcgggcaggacagatcatcagaaaagcccttactgaggaaaaacgtgtctcaacaaaaacatcagctgcagatcttgtgacagaaacagatcaccttgtggaagatttaattatttctgagttgcgagagaggtttccttcacacaggttcattgcagaagaggccgcggcttctggggccaagtgtgtgctcacccacagcccgacgtggatcatcgaccccatcgacggcacctgcaattttgtgcacagattcccgactgtggcggttagcattggatttgctgttcgacaagagcttgaattcggagtgatttaccactgcacagaggagcggctgtacacgggccggcggggtcggggcgccttctgcaatggccagcggctccgggtctccggggagacagatctctcaaaggccttggttctgacagaaattggccccaaacgtgaccctgcgaccctgaagctgttcctgagtaacatggagcggctgctgcatgccaaggcgcatggggtccgagtgattggaagctccacattggcactctgccacctggcctcaggggccgcggatgcctattaccagtttggcctgcactgctgggatctggcggctgccacagtcatcatcagagaagcaggcggcatcgtgatagacacttcgggtggacccctcgacctcatggcttgcagagtggttgcggccagcacccgggagatggcgatgctcatagctcaggccttacagacgattaactatgggcgggatgatgagaagtgactgcggctgaggcaaagctgctcccaaggcctccctgggctgctgtgggctcctggggaggtggccctcgtggcccacgctccatgccagtggctcacgctctgctcctggctaccccagagggagttgtcacgctacagtgagtggctggccttttaaatcgacgtctctctcaccaggatttggtgtttagctgtttctctctttaatctcacgtagcctttttcaggttagtacgtgttcttctgtcagggccaaaactcaaatctcctgtgaaatacgtattgataatccaatcttgatttttccccccagaatataaatctcaggtaataaggctttagaactgctgataaagcggatcgttctcaggccctccccccggagtacttcagaatgcaataaatcaaaataatggc

SEQ ID NO: 591 - DNA, 376 bp, Homo sapiens
ctataagtgctttatttttatattctctatgaaaacatcaataattaagcccctttgttctaagccagaaacactataaaactaccattaaacaaggcagtatcttgacaagaaagacataaaatgtccaagggatatttagaacattttagttcttaaagtttcaacatgagaaatgttgaccacacactgtgaaatcatttcaataaataacaactgacattcatctaaacagttacaaaacagatgtgcacatacattcccctgccttcacaatgatctcattggccatttgcttcggatccgccagcctctatcacagtggctggcatgttgcaggctcctcagaaatattaacataatgactggagaacat

SEQ ID NO: 592 - DNA, 475 bp, Homo sapiens
  modified_base (12)..(12): a, c, t or g
gattcggcacgngggaggaagctcactggtggctgttcctgaaggaggccctgccttataggaacagaagaggaaagagagacacagctgcagaggccacctggattgtgcctaatgtgtttgagcatcgcttaggagaagtcttctatttatttatttattcattagttttgaagattctatgttaatattttaggtgtaaaataattaagggtatgattaactctacctgcacactgtcctattatattcattctttttgaaatgtcaaccccaagttagttcaatctggattcatatttaatttgaaggtagaatgttttcaaatgttctccagtcattatgttaatatttctgaggagcctgcaacatgccagccactgtgatagaggctggcggatccaagcaaatggccaatgagatcattgtgaaggcaggggaatgtatgtgcacatctgttttgtaactggtttaa

SEQ ID NO: 593 - DNA, 1103 bp, Homo sapiens
cacagagcccgggccgcaggcacctcctcgccagctcttccgctcctctcacagccgccagacccgcctgctgagccccatggcccgcgctgctctctccgccgcccccagcaatccccggctcctgcgagtggcactgctgctcctgctcctggtagccgctggccggcgcgcagcaggagcgtccgtggccactgaactgcgctgccagtgcttgcagaccctgcagggaattcaccccaagaacatccaaagtgtgaacgtgaagtcccccggaccccactgcgcccaaaccgaagtcatagccacactcaagaatgggcggaaagcttgcctcaatcctgcatcccccatagttaagaaaatcatcgaaaagatgctgaacagtgacaaatccaactgaccagaagggaggaggaagctcactggtggctgttcctgaaggaggccctgcccttataggaacagaagaggaaagagagacacagctgcagaggccacctggattgtgcctaatgtgtttgagcatcgcttaggagaagtcttctatttatttatttattcattagttttgaagattctatgttaatattttaggtgtaaaataattaagggtatgattaactctacctgcacactgtcctattatattcattctttttgaaatgtcaaccccaagttagttcaatctggattcatatttaatttgaaggtagaatgttttcaaatgttctccagtcattatgttaatatttctgaggagcctgcaacatgccagccactgtgatagaggctggcggatccaagcaaatggccaatgagatcattgtgaaggcaggggaatgtatgtgcacatctgttttgtaactgtttagatgaatgtcagttgttatttattgaaatgatttcacagtgtgtggtcaacatttctcatgttgaaactttaagaactaaaatgttctaaatatcccttggacattttatgtctttcttgtaaggcatactgccttgtttaatggtagttttacagtgtttctggcttagaacaaaggggcttaattattgatgttttcatagagaatataaaaataaagcacttatag

SEQ ID NO: 594 - DNA, 542 bp, Homo sapiens
  modified_base (475)..(475): a, c, t or g
gatgaacgaatatacctcatccattggaattggagtttttcattcaggaattgaagtctatggcagagaatttgcttatggtggccatccttaccccttttctcggaatatttgaaatttccccaggaaatgcttctgaactaggagaaacatttaaatttaaagaagctgttgttttagggagcacggacttcctagaagatgatatagaaaaaattgtagaagaactgggaaaagaatacaaaggcaatgcttatcatttaatgcataaaaactcgcaatcatttttcttcagctttatcagagattctttgtgggaaagagattcctccgctgggatcaatccgacttgcctacttcagctcctggtataccctttctacagagttgcctcccgaaggaggtgggctcacgcccgcagccctgcagtctagtgtcagccaagaactccaggatgaactgggaggaagcagangatgctgccgcatccgctttccgtggcaagcactgcagcaggctccagacccgggcgccacactaac

SEQ ID NO: 595 - DNA, 543 bp, Homo sapiens
  modified_base (218)..(218): a, c, t or g
  modified_base (221)..(221): a, c, t or g
  modified_base (237)..(237): a, c, t or g
  modified_base (292)..(292): a, c, t or g
  modified_base (443)..(443): a, c, t or g
  modified_base (452)..(452): a, c, t or g
  modified_base (487)..(487): a, c, t or g
tgattacaaatataatcctgagctgaaaaactgggatttgggggagagccatctttgcatacaaaatatctaaaggatgcttctctgtttacttttctctagtgatattcgactgccagagacagttctgaatgtgtgactttggagacatttatagtttagtgtggcgcccgggtctggagcctgctgcagtgcttgccacggaagcggatgggcanacntcatcgcttcctccangttcatcctggagttcttggctgacactagactgcagggctgcgggcgtgacacntccttcgggaggcaactctgtagaaagggtatacaggagctgaagtaggcaagtcgattgatccagcgaggaatctctttcccacaaagaatctctgataaagctgaagaaaaaatgaattgcagtttttaatgcattaaatgataagcantgcctttgnaatcctttcccagttcttctacaaatttttcctanatcatcttctagggaaatccgtgctccctaaaaaaaaagcttctttaaaatttaaa

SEQ ID NO: 596 - DNA, 4085 bp, Homo sapiens
taggggaggtgcctcatccggagcgggccgccaacggtccggccccgtccgcacagacgctcctgtcggcggcgcccgggagcggctcggctgcccgatgcttccgccccggctgccgcgggccgggctgtacgcttagtgcccggctcaggccccctgaagcgcccgcgggggtgagagcggcctccggccccgcggagacggagcggcttgaggacgaggcggcggccgcggggaggaggatgggggctaaccagttagtggtgctcaacgtgtacgacatgtattggatgaacgaatatacctcatccattggaattggagtttttcattcaggaattgaagtctatggcagagaatttgcttatggtggccatccttaccccttttctggaatatttgaaatttccccaggaaatgcttctgaactaggagaaacatttaaatttaaagaagctgttgttttagggagcacggacttcctagaagatgatatagaaaaaattgtagaagaactgggaaaagaatacaaaggcaatgcttatcatttaatgcataaaaactgcaatcatttttcttcagctttatcagagattctttgtgggaaagagattcctcgctggatcaatcgacttgcctacttcagctcctgtataccctttctacagagttgcctcccgaaggagtggctcacgcccgcagccctgcagtctagtgtcagccaagaactccaggatgaactggaggaagcagaggatgctgccgcatccgcttccgtggcaagcactgcagcaggctccagacccgggcgccacactaaactataaatgtctccaaagtcacacattcagaactgtctctggcagtcgaatatcactagagaaaagtaaacagagaagcatcctttagatattttgtatgcaaagatggctctcccccaaatcccagtttttcagctcaggattatatttgtaatcaaaaaaaaaaaatcacttggcgcaggagggagaactttgtaagaagctgccctctgttttttttatccactcgtaaatctggatttatttcttctgttttatacaagctctgttaagttatgtttacagtatcttgtatcgctgtttacaaatcttgcatggactcctgccacagtgaaagaagaaaatcttcatgtcttcaaaaattaggcaggtaatctttgtatacttctgacaattgccagatctatggcataaataggcacacaaaaaggtacttaaacagttatagtcaccatcacctgcttcagaatggtcttttagatttgtgtttgttttgttaaagttgttggcaccaggatgcagagaatcagactggcctgaggtgaaggagcacacagccctgagggcttggaaccctgggtccagttcctcttcacacccccttccactctgagtagcacatctccccaggtgcccatggaacacctgctttcatcccaaatatccgtccacctaggcggggtggtatgttcttacgtctctctgactttgatgccactcattctatagtttagctggttttcgttcaagatattcttggtagtaactgacaagtatgttgcacatgtattgggggaggcgcttcatttttattttaatacacatgtatttcctccttgcacaggattttgatggtgtgggaatatcctaagtggtagccttccaagtagcagtgagttgacattcagctgcttttaactattcaggctaccttttatactaaaccttgaaaactagaatctaatgtctaccccaaaaaagtagttctttgatattttatactttttatgtaccatgtcagaaagagtatgttggcgtttgtcatgggactcatttcacataatagaatgcctagtctcattgaccaatcgttaaaaaatcatatttgtgtgtcttaagattcatatttatatgttctctcaaatgtatgtctcttacgtaacatactctaagaatgaaactgtcaccacaggtaaatccttgttagcaaggaatctgtctgctccagtctactcctagtttgatccttggatgtaagaaccaagtcattacatgtcaaattcaatttttctgccttaagaatgaatgtccttcataaaatattggatgcagtgtaacactatccaaggcagtgacttcagctttatatacatataaaatatagttagttttaaaattattgacatttatttaaacttttagattggattgtttgctattgctctgtgtgaggatacataatctttcagtaaactgtatttttaacttttccataagctgattttggttcattttatcaacgtaagcacaccctgttcatagggaaaataaaccttgggttataagcattagcctgaggacaatgaagccacttaacctaatttatgctttcgactgttctgtttccagagaggaaagcctttacaaattactctcagttctttaggggcagaaggcttgtttcaagaggtttgacagaagaaaggaatatatgaacttaatgagatgtcgacttggttcaggtctaaaaatgagggcaaaacactaaggctctagcagtgacttgttcactaaaaagagagagtcctgtccccagacggttagtacaaagccttggatacagtttgcttgtaatatttttaataatgtgaggagtacagtgttttctaattcattcaagtatatatgatttaaacctgggctactgacacacacacagtagccattagttagactcttcttagtgaatatcaggaacatcccatctgtgcttaaccagaatccagcaagtcagcacacaagtgattttattgttattttgttgtatttacttgcatttgttgtatttactttcatctgcagcatttggagtttaaaaataatgtaaagggttctagtagaaatagtgtcctaaggccaattacctaccatactaacaatcagcagataaaattctggacgtgagattccttataatctaattatacctgaggttgagcaagaaatgtcttcctttagaaaatctcattcaagtcaggttcttctctacagttcaaaattgagaatggatttaattaactagcatttagccagctttttcttgcccttggagaaaaagaatcattctcaacctgataatctgttaagaaaaatcccatatgaacaatctggtcattaacatacatatgatacggagtctctttgttgtcaccaagtgaacatacttctcatggtgggttggacagtaatacatgttagagggtcagaagcttctggtttctgctgtttgctttaaatacccttggggtttttttttaaacccttacaaggggagcatcagctttggaaagtgtgactctgtaggagtgtagaaggcagtggtgtatgatcttagcctcgtcctgatgcctgaatccagccagctgttgctctgacccacagcaatagagcaagttacccatcaccagcatttgtacagagcagggaattctggttttagtccattggtagcattgtgtgtatgaggagattcaacaccacagacagctgcaggactcgatatccatggcttctttccatcacaaaacgggtagaaacacattcactgcttcagggttctaatctgtgtgtctccttatgactccatttctgtaagctactctgtaactttgatatatgctgtattttctttctttaaaagatttagatgttttttcagcaagctagccatacaaccattgtatctctttctcttcagtatggtttagagcccagatcagttagtaggctttcgttgtcttctctttcaatacatgtacatctttactgtttgaaaagtgttacagctgtcaaagaatcttcatggacctgaagataatttcttgtgaagttgaatgcaagtgtactgtcattcatagtgtttatatcaaaataccaggaatcttcacttttgctaccttgatatagcattgggctatcatgttacaacattgaaatacattgatttattaaaaaatacttttataagaaaaaaaaaaaaaaaaa

SEQ ID NO: 597 - DNA, 440 bp, Homo sapiens
  modified_base (315)..(315): a, c, t or g
  modified_base (375)..(375): a, c, t or g
ttttttttttttttttttttgatggttgacagattcttttattaacagtcaaaaacttcacacaattggaaaataaatgtttcttcaatgaataatcaaacaaaaattatccaggaccttatagggttttcagtatgtaccaggcttgatgcacatcttagaagacaggacattatcttgctgggatcattagggtatgatcagcataacgatcgtggtttactttttgcaagccatgtatctttcagttacattctcccagttgattacattccaaatagcttttagataatcaggcctgacatttttatactngaaggtagtaagcgtgctcccacacatcaatccccagcagtcggaataaggcctgttgtnccttgcagtggatcctgatttggacaagcagcaatttgtaagtgtccccgttccttattgaaacc

SEQ ID NO: 598 - DNA, 1593 bp, Homo sapiens
gcggtgcccttgcggcgcagctggggtcgcggccctgctccccgcgctttcttaaggcccgcgggcggcgcaggagcggcactcgtggctgtggtggcttcggcagcggcttcagcagatcggcggcatcagcggtagcaccagcactagcagcatgttgagccgggcagtgtgcggcaccagcaggcagctggctccggttttggggtatctgggctccaggcagaagcacagcctccccgacctgccctacgactacggcgccctggaacctcacatcaacgcgcagatcatgcagctgcaccacagcaagcaccacgcggcctacgtgaacaacctgaacgtcaccgaggagaagtaccaggaggcgttggccaagggagatgttacagcccagatagctcttcagcctgcactgaagttcaatggtggtggtcatatcaatcatagcattttctggacaaacctcagccctaacggtggtggagaacccaaaggggagttgctggaagccatcaaacgtgactttggttcctttgacaagtttaaggagaagctgacggctgcatctgttggtgtccaaggctcaggttggggttggcttggtttcaataaggaacggggacacttacaaattgctgcttgtccaaatcaggatccactgcaaggaacaacaggccttattccactgctggggattgatgtgtgggagcacgcttactaccttcagtataaaaatgtcaggcctgattatctaaaagctatttggaatgtaatcaactgggagaatgtaactgaaagatacatggcttgcaaaaagtaaaccacgatcgttatgctgagtatgttaagctctttatgactgtttttgtagtggtatagagtactgcagaatacagtaagctgctctattgtagcatttcttgatgttgcttagtcacttatttcataaacaacttaatgttctgaataatttcttactaaacattttgttattgggcaagtgattgaaaatagtaaatgctttgtgtgattgaatctgattggacattttcttcagagagctaaattacaattgtcatttataaaaccatcaaaaatattccatccatatactttggggacttgtagggatgcctttctagtcctattctattgcagttatagaaaatctagtcttttgccccagttacttaaaaataaaatattaacactttcccaagggaaacactcggctttctatagaaaattgcactttttgtcgagtaatcctctgcagtgatacttctggtagatgtcacccagtggtttttgttaggtcaaatgttcctgtatagtttttgcaaatagagctgtatactgtttaaatgtagcaggtgaactgaactggggtttgctcacctgcacagtaaaggcaaacttcaacagcaaaactgcaaaaaggtggtttttgcagtaggagaaaggaggatgtttatttgcagggcgccaagcaaggagaattgggcagctcatgcttgagacccaatctccatgatgacctacaagctagagtatttaaaggcagtggtaaatttcaggaaagcagaagtt

SEQ ID NO: 599 - DNA, 377 bp, Homo sapiens
  modified_base (97)..(97): a, c, t or g
  modified_base (203)..(203): a, c, t or g
  modified_base (327)..(327): a, c, t or g
  modified_base (332)..(332): a, c, t or g
ggggttttaccagttttatttctagactttcatgtttgtctttttgtcttctgctggaaacatgccggttacatgttggtgctgggaagcgccgcgntgcaaccagaaatgcacagacccagccgcccgccgcccagaccctcagacttgcgcgtcacaggacagactccgctgtgccccgtgcacttgccaccagcctttgnctctcgatacacacaacatccaggacttgtgcccttgccccatcacgacagacaaagcgtccctcaaggcccccgcgtggttcagacagacgccgcagccaggatggttcgaggtaagcgtganccgtngttctggaggggtggggcggggtgggcctgtgccgaagatggcct

SEQ ID NO: 600 - DNA, 434 bp, Homo sapiens
agctatggaagttgcataattattattattattattataacaagtgtgtcttacgtgccaccacggcgttgtacctgtaggactctcattcgggatgattggaatagcttctggaatttgttcaagttttgggtatgtttaatctgttatgtactagtgttctgtttgttattgttttgttaattacaccataatgctaatttaaagagactccaaatctcaatgaagccagctcacagtgctgtgtgccccggtcacctaagcaagctgcccgaaccaaaagaatttgcaccccgctgcgggcccaccgtggttggggcccctgccaatggcagggtcaatcctgtgctcggaggccatctcgggcacaggccacccccgccccacccctccagaacacggctcacgcttacctcaaccatcctgggctgcgg

SEQ ID NO: 601 - DNA, 4306 bp, Homo sapiens
cacacggactacaggggagttttgttgaagttgcaaagtcctggagcctccagagggctgtcggcgcagtagcagcgagcagcagagtccgcacgctccggcgaggggcagaagagcgcgagggagcgcggggcagcagaagcgagagccgagcgcggacccagccaggacccacagccctccccagctgcccaggaagagccccagccatggaacaccagctcctgtgctgcgaagtggaaaccatccgccgcgcgtaccccgatgccaacctcctcaacgaccgggtgctgcgggccatgctgaaggcggaggagacctgcgcgccctcggtgtcctacttcaaatgtgtgcagaaggaggtcctgccgtccatgcggaagatcgtcgccacctggatgctggaggtctgcgaggaacagaagtgcgaggaggaggtcttcccgctggccatgaactacctggaccgcttcctgtcgctggagcccgtgaaaaagagccgcctgcagctgctgggggccacttgcatgttcgtggcctctaagatgaaggagaccatccccctgacggccgagaagctgtgcatctacaccgacaactccatccggcccgaggagctgctgcaaatggagctgctcctggtgaacaagctcaagtggaacctggccgcaatgaccccgcacgatttcattgaacacttcctctccaaaatgccagaggcggaggagaacaaacagatcatccgcaaacacgcgcagaccttcgttgccctctgtgccacagatgtgaagttcatttccaatccgccctccatggtggcagcggggagcgtggtggccgcagtgcaaggcctgaacctgaggagccccaacaacttcctgtcctactaccgcctcacacgcttcctctccagagtgatcaagtgtgacccagactgcctccgggcctgccaggagcagatcgaagccctgctggagtcaagcctgcgccaggcccagcagaacatggaccccaaggccgccgaggaggaggaagaggaggaggaggaggtggacctggcttgcacacccaccgacgtgcgggacgtggacatctgagggcgccaggcaggcgggcgccaccgccacccgcagcgagggcggagccggccccaggtgctcccctgacagtccctcctctccggagcattttgataccagaagggaaagcttcattctccttgttgttggttgttttttcctttgctctttcccccttccatctctgacttaagcaaaagaaaaagattacccaaaaactgtctttaaaagagagagagagaaaaaaaaaatagtatttgcataaccctgagcggtgggggaggagggttgtgctacagatgatagaggattttataccccaataatcaactcgtttttatattaatgtacttgtttctctgttgtaagaataggcattaacacaaaggaggcgtctcgggagaggattaggttccatcctttacgtgtttaaaaaaaagcataaaaacattttaaaaacatagaaaaattcagcaaaccatttttaaagtagaagagggttttaggtagaaaaacatattcttgtgcttttcctgataaagcacagctgtagtggggttctaggcatctctgtactttgcttgctcatatgcatgtagtcactttataagtcattgtatgttattatattccgtaggtagatgtgtaacctcttcaccttattcatggctgaagtcacctcttggttacagtagcgtagcgtggccgtgtgcatgtcctttgcgcctgtgaccaccaccccaacaaaccatccagtgacaaaccatccagtggaggtttgtcgggcaccagccagcgtagcagggtcgggaaaggccacctgtcccactcctacgatacgctactataaagagaagacgaaatagtgacataatatattctatttttatactcttcctatttttgtagtgacctgtttatgagatgctggttttctacccaacggccctgcagccagctcacgtccaggttcaacccacagctacttggtttgtgttcttcttcatattctaaaaccattccatttccaagcactttcagtccaataggtgtaggaaatagcgctgtttttgttgtgtgtgcagggagggcagttttctaatggaatggtttgggaatatccatgtacttgtttgcaagcaggactttgaggcaagtgtgggccactgtggtggcagtggaggtggggtgtttgggaggctgcgtgccagtcaagaagaaaaaggtttgcattctcacattgccaggatgataagttcctttccttttctttaaagaagttgaagtttaggaatcctttggtgccaactggtgtttgaaagtagggacctcagaggtttacctagagaacaggtggtttttaagggttatcttagatgtttcacaccggaaggtttttaaacactaaaatatataatttatagttaaggctaaaaagtatatttattgcagaggatgttcataaggccagtatgatttataaatgcaatctccccttgatttaaacacacagatacacacacacacacacacacacacacaaaccttctgcctttgatgttacagatttaatacagtttatttttaaagatagatccttttataggtgagaaaaaaacaatctggaagaaaaaaaccacacaaagacattgattcagcctgtttggcgtttcccagagtcatctgattggacaggcatgggtgcaaggaaaattagggtactcaacctaagttcggttccgatgaattcttatcccctgccccttcctttaaaaaacttagtgacaaaatagacaatttgcacatcttggctatgtaattcttgtaatttttatttaggaagtgttgaagggaggtggcaagagtgtggaggctgacgtgtgagggaggacaggcgggaggaggtgtgaggaggaggctcccgaggggaaggggcggtgcccacaccggggacaggccgcagctccattttcttattgcgctgctaccgttgacttccaggcacggtttggaaatattcacatcgcttctgtgtatctctttcacattgtttgctgctattggaggatcagttttttgttttacaatgtcatatactgccatgtactagttttagttttctcttagaacattgtattacagatgccttttttgtagttttttttttttttatgtgatcaattttgacttaatgtgattactgctctattccaaaaaggttgctgtttcacaatacctcatgcttcacttagccatggtggacccagcgggcaggttctgcctgctttggcgggcagacacgcgggcgcgatcccacacaggctggcgggggccggccccgaggccgcgtgcgtgagaaccgcgccggtgtccccagagaccaggctgtgtccctcttctcttccctgcgcctgtgatgctgggcacttcatctgatcgggggcgtagcatcatagtagtttttacagctgtgttattctttgcgtgtagctatggaagttgcataattattattattattattataacaagtgtgtcttacgtgccaccacggcgttgtacctgtaggactctcattcgggatgattggaatagcttctggaatttgttcaagttttgggtatgtttaatctgttatgtactagtgttctgtttgttattgttttgttaattacaccataatgctaatttaaagagactccaaatctcaatgaagccagctcacagtgctgtgtgccccggtcacctagcaagctgccgaaccaaaagaatttgcaccccgctgcgggcccacgtggttggggccctgccctggcagggtcatcctgtgctcggaggccatctcgggcacaggcccaccccgccccacccctccagaacacggctcacgcttacctcaaccatcctggctgcggcgtctgtctgaaccacgcgggggccttgagggacgctttgtctgtcgtgatggggcaagggcacaagtcctggatgttgtgtgtatcgagaggccaaaggctggtggcaagtgcacggggcacagcggagtctgtcctgtgacgcgcaagtctgagggtctgggcggcgggcggctgggtctgtgcatttctggttgcaccgcggcgcttcccagcaccaacatgtaaccggcatgtttccagcagaagacaaaaagacaaacatgaaagtctagaaataaaactggtaaaaccccaaaaaaaaaaaaaaaa

SEQ ID NO: 602 - DNA, 445 bp, Homo sapiens
  modified_base (48)..(48): a, c, t or g
  modified_base (51)..(51): a, c, t or g
  modified_base (115)..(115): a, c, t or g
  modified_base (414)..(414): a, c, t or g
  modified_base (438)..(438): a, c, t or g
tttttttttttgggggttcacactggtttattgggggccctgcggcanagnagctcttcagtgcataggcagacatgcatgtggggcagtgctaggaactggggtaggccttggnaggggtcactggcaggtgttgtagatctgcacctgcaagttgatggcttgaagcacagctgcgcatcctggcctccaacccgtccaactgggctgccttactctccagtgcccgctcattttcctcataggtgccttccaattcctgtagccgctgcagcttgtcctgagcggcttgcaacaggtcccgagcctcatcccgcagttgttctgcccttgcctgtgcagccagcacaccttgggccttgcgctcagctagggccttcaccgtctggtactgatcaccagaggaccgcgtanaggctggctcagcctcctgggcangaaccta

SEQ ID NO: 603 - DNA, 451 bp, Homo sapiens
  modified_base (49)..(49): a, c, t or g
  modified_base (389)..(389): a, c, t or g
  modified_base (411)..(411): a, c, t or g
  modified_base (421)..(421): a, c, t or g
gaaatagtctggcagcctctacagcagaagaaacggcaggcagtgccangggtcgtgcccaggaggctgagcagctgctacgcggtcctctgggtgatcagtaccagacggtgaaggccctagctgagcgcaaggcccaaggtgtgctggctgcacaggcaagggcagaacaactgcgggatgaggctcgggacctgttgcaagccgctcaggacaagctgcagctgctacaggaattggaaggcacctatgaggaaaatgagcgggcactggagagtaaggcagcccagttggacgggttggaggccaggatgcgcacgtgctttcaagccatcaacttgcaggtgcagatctacaacacctgccagtgaccccttgcccaaggcctnaccccagttcctaagcacttgncccacattgnattgtctgccttatgcactgaaagagctct

SEQ ID NO: 604 - DNA, 5815 bp, Homo sapiens
gaaggcagtttccggagggaaggggtagggttggggtgggggcgctctccgcccggtgttgcgctccttcccagaatccgctccggcctttccttcctgccgcgattcccaactttgctcaaagtcgctggactctaagctgtcggagggaccgctggacagacctgggaactgacagagggcctggagggaaacaggccaaagacccacaggcagagttgacacggaaccccaaagcaaggaggagggctcgggccgagaccgttcacctccccttatccctgttcccctcttcaggatggagctgacctcaagggaaagagggaggggacagcctctgccctgggaacttcgactgggcctactgctaagcgtgctggctgccacactggcacaggcccctgccccggatgtgcctggctgttccaggggaagctgctaccccgccacgggcgacctgctggtgggccgagctgacagactgactgcctcatccacttgtggcctgaatggcccccagccctactgcatcgtcagtcacctgcaggacgaaaagaagtgcttcctttgtgactcccggcgccccttctctgctagagacaacccacacagccatcgcatccagaatgtagtcaccagctttgcaccacagcggcgggcagcctggtggcagtcagagaatggtatccctgcggtcaccatccagctggacctggaggctgagtttcatttcacacacctcattatgaccttcaagacatttcgccctgctgccatgctggtggaacgctcagcagactttggccgaacctggcatgtgtaccgatatttctcctatgactgtggggctgacttcccaggagtcccactagcacccccacggcactgggatgatgtagtctgtgagtcccgctactcagagattgagccatccactgaaggcgaggtcatctatcgtgtgctggaccctgccatccctatcccagacccctacagctcacggattcagaacctgttgaagatcaccaacctacgggtgaacctgactcgtctacacacgttgggagacaacctactcgacccacggagggagatccgagagaagtactactatgccctctatgagctggttgtacgtggcaactgcttctgctacggacacgcctcagagtgtgcacccgccccaggggcaccagcccatgctgagggcatggtgcacggagcttgcatctgcaaacacaacacacgtggcctcaactgcgagcagtgtcaggatttctatcgtgacctgccctggcgtccggctgaggacggccatagtcatgcctgtaggaagtgtgagtgccatgggcacacccacagctgccacttcgacatggccgtatacctggcatctggcaatgtgagtggaggtgtgtgtgatggatgtcagcataacacagctgggcgccactgtgagctctgtcggcccttcttctaccgtgacccaaccaaggacctgcgggatccggctgtgtgccgctcctgtgattgtgaccccatgggttctcaagacggtggtcgctgtgattcccatgatgaccctgcactgggactggtctccggccagtgtcgctgcaaagaacatgtggtgggcactcgctgccagcaatgccgtgatggcttctttgggctcagcatcagtgaccgtctgggctgccggcgatgtcaatgtaatgcacggggcacagtgcctgggagcactccttgtgaccccaacagtggatcctgttactgcaaacgtctagtgactggacgtggatgtgaccgctgcctgcctggccactggggcctgagccacgacctgctcggctgccgcccctgtgactgcgacgtgggtggtgctttggatccccagtgtgatgagggcacaggtcaatgccactgccgccagcacatggttgggcgacgctgtgagcaggtgcaacctggctacttccggcccttcctggaccacctaatttgggaggctgaggacacccgagggcaggtgctcgatgtggtggagcgcctggtgacccccggggaaactccatcctggactggctcaggcttcgtgcggctacaggaaggtcagaccctggagttcctggtggcctctgtgccgaaggctatggactatgacctgctgctgcgcttagagccccaggtccctgagcaatgggcagagttggaactgattgtgcagcgtccagggcctgtgcctgcccacagcctgtgtgggcatttggtgcccaaggatgatcgcatccaagggactctgcaaccacatgccaggtacttgatatttcctaatcctgtctgccttgagcctggtatctcctacaagctgcatctgaagctggtacggacagggggaagtgcccagcctgagactccctactctggacctggcctgctcattgactcgctggtgctgctgccccgtgtcctggtgctagagatgtttagtgggggtgatgctgctgccctggagcgccaggccacctttgaacgctaccaatgccatgaggagggtctggtgcccagcaagacttctccctctgaggcctgcgcacccctcctcatcagcctgtccaccctcatctacaatggtgccctgccatgtcagtgcaaccctcaaggttcactgagttctgagtgcaaccctcatggtggtcagtgcctgtgcaagcctggagtggttgggcgccgctgtgacctctgtgcccctggctactatggctttggccccacaggctgtcaagcctgccagtgcagccacgagggggcactcagcagtctctgtgaaaagaccagtgggcaatgtctctgtcgaactggtgcctttgggcttcgctgtgaccgctgccagcgtggccagtggggattccctagctgccggccatgtgtctgcaatgggcatgcagatgagtgcaacacccacacaggcgcttgcctgggctgccgtgatcacacagggggtgagcactgtgaaaggtgcattgctggtttccacggggacccacggctgccatatgggggccagtgccggccctgtccctgtcctgaaggccctgggagccaacggcactttgctacttcttgccaccaggatgaatattcccagcagattgtgtgccactgccgggcaggctatacggggctgcgatgtgaagcttgtgcccctgggcactttggggacccatcaaggccaggtggccggtgccaactgtgtgagtgcagtgggaacattgacccaatggatcctgatgcctgtgacccccacacgggccaatgcctgcgctgtttacaccacacagagggtccacactgtgcccactgcaagcctggcttccatgggcaggctgcccgacagagctgtcaccgctgcacatgcaacctgctgggcacaaatccgcagcagtgcccatctcctgaccagtgccactgtgatccaagcagtgggcagtgcccatgcctccccaatgtccagggccctagctgtgaccgctgtgcccccaacttctggaacctcaccagtggccatggttgccagccttgtgcctgccacccaagccgggccagaggccccacctgcaacgagttcacagggcagtgccactgccgtgccggctttggagggcggacttgttctgagtgccaagagctccactggggagaccctgggttgcagtgccatgcctgtgattgtgactctcgtggaatagatacacctcagtgtcaccgcttcacaggtcactgcagctgccgcccaggggtgtctggtgtgcgctgtgaccagtgtgcccgtgcgttctcaggaatctttcctgcctgccatccctgccatgcatgcttcggggattgggaccgagtggtgcaggacttggcagcccgtacacagcgcctagagcagcgggcgcaggagttgcaacagacgggtgtgctgggtgcctttgagagcagcttctggcacatgcaggagaagctgggcattgtgcagggcatcgtaggtgcccgcaacacctcagccgcctccactgcacagcttgtggaggccacagaggagctgcggcgtgaaattggggaggccactgagcacctgactcagctcgaggcagacctgacagatgtgcaagatgagaacttcaatgccaaccatgcactaagtggtctggagcgagataggcttgcacttaatctcacactgcggcagctcgaccagcatcttgacttgctcaaacattcaaacttcctgggtgcctatgacagcatccggcatgcccatagccagtctgcagaggcagaacgtcgtgccaatacctcagccctggcagtacctagccctgtgagcaactcggcaagtgctcggcatcggacagaggcactgatggatgctcagaaggaggacttcaacagcaaacacatggccaaccagcgggcacttggcaagctctctgcccatacccacaccctgagcctgacagacataaatgagctggtgtgtggggcaccaggggatgcaccctgtgctacaagcccttgtgggggtgccggctgtcgagatgaggatgggcagccgcgctgtgggggcctcagctgcaatggggcagcggctacagcagacctagcactgggccgggcccggcacacacaggcagagctgcagcgggcactggcagaaggtggtagcatcctcagcagagtggctgagactcgtcggcaggcaagcgaggcacagcagcgggcccaggcagccctggacaaggctaatgcttccaggggacaggtggaacaggccaaccaggaacttcaagaacttatccagagtgtgaaggacttcctcaaccaggagggggctgatcctgatagcattgaaatggtggccacacgggtgctagagctctccatcccagcttcagctgagcagatccagcacctggcgggcgcgattgcagagcgagtccggagcctggcagatgtggatgcgatcctggcacgtactgtaggagatgtgcgtcgtgccgagcagctactgcaggatgcacggcgggcaaggagctgggctgaggatgagaaacagaaggcagagacagtacaggcagcactggaggaggcccagcgggcacagggtattgcccagggtgccatccggggggcagtggctgacacacgggacacagagcagaccctgtaccaggtacaggagaggatggcaggtgcagagcgggcactgagctctgcaggtgaaagggctcggcagttggatgctctcctggaggctctgaaattgaaacgggcaggaaatagtctggcagcctctacagcagaagaaacggcaggcagtgcccagggtcgtgcccaggaggctgagcagctgctacgcggtcctctgggtgatcagtaccagacggtgaaggccctagctgagcgcaaggcccaaggtgtgctggctgcacaggcaagggcagaacaactgcgggatgaggctcgggacctgttgcaagccgctcaggacaagctgcagcggctacaggaattggaaggcacctatgaggaaaatgagcgggcactggagagtaaggcagcccagttggacgggttggaggccaggatgcgcagcgtgcttcaagccatcaacttgcaggtgcagatctacaacacctgccagtgacccctgcccaaggcctaccccagttcctagcactgccccacatgcatgtctgcctatgcactgaagagctcttggcccggcagggcccccaataaaccagtgtgaacccccaaaaaaaaa

SEQ ID NO: 605 - DNA, 347 bp, Homo sapiens
  modified_base (270)..(270): a, c, t or g
  modified_base (316)..(316): a, c, t or g
ttttttttttatatcaaacacatttattcttaaagtgagaagctcatcaaggatagctagaggagagtgaaatatttacagtagaaaagtatggatgctagccaaacttcaaattctgtcactgcagagttattccgatagtacttttccaccatggcacatcacacatgttaaaattaactgcattcttgtaacacctctcaatgggttgtgcacaataatagaagcaacattctggggactctttttcttaagatcctacagaatgantttatgcacacacaaaaacaagtataatacaaaacattcaaaacangtcacatccatttttttaaaaaaaagaaaac

SEQ ID NO: 606 - DNA, 471 bp, Homo sapiens
gtgatctataaaaaatcataatttggggaaagtttaagcaaatctggctttgtagtcctgatgttataagtgactttgtgatcaaactgtcaggcttgggttcttgttatagaatgcttggtatagaaaaaccatgccatcattaatggctaacaacacgtagggacttcatgtcatgtcaaagatagctctttgcaagtgccttgattaaaccagaaaactgtcatcgtttaacccaaatatctgaatggtcatctggtaactcatgggtctttggcctcataagatggtccactctgtacacaggcattcctcctgcaataatgttgtatctttgagaccgttgtcagtgtacacaactcacatccttcatattgaaggtgactcatttttctgcacacttttttgatgtgatgcttgacgtgaggcccgacactaggattctcaatgcaagaatccagtaccttgcac

SEQ ID NO: 607 - DNA, 2647 bp, Homo sapiens
gagataagcggcctctaggcgccgggccctcagtctctcccagcgaccgccgcgggggcaaggcctggagctgtggttcgaatttgtgcaggcagcgggtgctggcttttagggtccgccgcctctctgcctaatgagctgcaccagaatgatccaggttttagatccacgtcctttgacaagttcggtcatgcccgtggatgtggccatgaggctttgcttggcacattcaccacctgtgaagagtttcctgggcccgtacgatgaatttcaacgacgacattttgtgaataaattaaagcccctgaaatcatgtctcaatataaaacacaaagccaaatcacagaatgactggaagtgctcacacaaccaagccaagaagcgcgttgtgtttgctgactccaagggcctctctctcactgcgatccatgtcttctccgacctcccagaagaaccagcgtgggatctgcagtttgatctcttggaccttaatgatatctcctctgccttaaaacaccacgaggagaaaaacttgattttagatttccctcagccttcaaccgattacttaagtttccggagccactttcagaagaactttgtctgtctggagaactgctcgttgcaagagcgaacagtgacagggactgttaaagtcaaaaatgtgagttttgagaagaaagttcagatccgtatcactttcgattcttggaaaaactacactgacgtagactgtgtctatatgaaaaatgtgtatggtggcacagatagtgataccttctcatttgccattgacttaccccctgtcattccaactgagcagaaaattgagttctgcatttcttaccatgctaatgggcaagtcttttgggacaacaatgatggtcagaattatagaattgttcatgttcaatggaagcctgatggggtgcagacacagatggcaccccaggactgtgcattccaccagacgtctcctaagacagagttagagtcaacaatctttggcagtccgaggctggctagtgggctcttcccagagtggcagagctgggggagaatggagaacttggcctcttatcgatgaattaagcaacaatgtaactggtcttgacttgtcatattcccccatgcaatcctaggtctgtattgctcaattttaggaagcctttgctactccatcagtaggtttagatttgagcttttgagacctggctatggaaaagaaagacacttgagaatttagtgttggggtctgtacagatgatgctacccaatttggctttgaaggatcaagtaacaggttgaaaactatttttataaaggtaatactttttcagttcccttcttccttccctctcaatccactagctttcatgttgggcaaggaaaagttgaggaaggatggctgatggtgatggaaagctgtgttaatggtatgaggaatgtgtgaaaagtatacacaaagggctctgaagctcaagtcagaggagtgggaggtctgatcattgttggtggaaaaacgtaaggttattttgtgcttttaagttggttttacaattctttcctggggaaattatttctggaggggaaaaagatccattctacgtatccttgtggagaaaagctaaataacctttaagaatgtgggtggtattggagaaagaagatgaattatagctccggagaatcaagatcttaagtgaagcctttctgttcagatgtgatctataaataatcataatttggggaaagtttaagcaaatctggctttgtagtcctgatgttataagtgactttgtgatcaaactgtcaggcttgggttcttgttatagaatgcttggtatagaaaaaccatgccatcattaatggctaacaacacgtagggacttcatgtcatgtcaaagatagctctttgcaagtgccttgattaaaccagaaaactgtcatcgtttaacccaaatatctgaatggtcatctggtaactcatgggtttttggcctcataagatggtccactctgtacacaggcattcctcctgcaataatgttgtatctttgagaccgttgtcagtgtacacaactcacatccttcatattgaaggtgactcatttttctgcacacttttttgatgtgatgcttgacgtgaggcccgacactaggattctcaatgcaagaatccagtaccttgcacatagaagtagcaacccatcccttgcctattttcatcttgctgttttcttttttttaaaaaaatggatgtgacttgttttgaatgttttgtattatacttgtttttgtgtgtgcataaattcattctgtaggatcttaagaaaaagagtcccagaatgttgcttctattattgtgcacaaccattgagaggtgttacaagaatgcagttaattttaacatgtgtgatgtgccatggtggaaaagtactatcggaataactctgcagtgacagaatttgaagtttggctagcatccatacttttctactgtaaatatttcactctcctctagctatccttgatgagcttctcactttaagaataaatgtgtttgatataaaaaaaaaaaaaaaaaaaaaaaaaaaaaaaaaaaaaaaaaaaaaaaaaaaaaaaaaaaaaaaaaaaaaaaaaaaaa

SEQ ID NO: 608 - DNA, 282 bp, Homo sapiens
  modified_base (243)..(243): a, c, t or g
ttttttttgacacaagactaattactttattaggtgcattctataagttgaagaggagaatttttggcaaataaataaataaataaataaataatcaaacagagactctggggcccgaggagctcaggaaaacggaagcggagtctttgcatagttctaaatgaacaggaggtggcagcagtaggcaacgcggattctcggcggaaatgcagcacttgcaaaaaccagggacagaaggctttnagaaagaggagaaggtcagaaggtgactaactatttctt

SEQ ID NO: 609 - DNA, 450 bp, Homo sapiens
  modified_base (27)..(27): a, c, t or g
  modified_base (136)..(136): a, c, t or g
  modified_base (449)..(449): a, c, t or g
ctgctattgtgtggatgccgcgcgtgncctctctctttccagagatggctaacaggggcccgagctatggcttaagcgagaggtgcaggagaagatcgagcagaagtatgatgcggacctggagaacaagctggtngactggatcatcctgcagtgcgccgaggacatagagcacccgccccccggcagcgccattttcagaaatggttaatggacgggacggtcctgtgcaagctgataaatagtttatacccaccaggacaagagcccatacccaagatctcacgagtcaaagatggcttttaagcacgattggagcaaatctcccagttcctaaaagctgcggagacctatggtgtcagaaccaccgacatctttcagacggtggatctatgggaagggaaggacatggcagctgtgcagaaggaccctgatggctttaggcaagng

SEQ ID NO: 610 - DNA, 1503 bp, Homo sapiens
gtgcagctgctggcctcgtagacaatcggctgtctccccagaagagggaaagaattgtgcagatgagaaagaggctctcagcgggagggaggcaggcgggcttgattgacacaggagagggctggctttttggagggctcttagcaacggccctggttgagccccctcagccatgagaaaatcaaatcaatgtgccattcttccaggcgcgaggcagcagcggctgcagttcaacatgaaaggaggcttcctccctgcctgctaattacctgctcttcccgatctcatcgtttctgcctttgcaaagtgctactgagaagggggaagaaacgtccgccacccatcccccttgctgcctgggggttcagacttgattgtgaaaccccattggcttcattggctccttgatttaaaccacgcccggctttctgccctctttgctgctgctgggccaggttgcccagccatatcccagccccgtctgcagggagccggaggctgctgctgctgctattgtgtggatgccgcgcgtgtcttctcttctttccagagatggctaacaggggcccgagctatggcttaagccgagaggtgcaggagaagatcgagcagaagtatgatgcggacctggagaacaagctggtggactggatcatcctgcagtgcgccgaggacatagagcacccgccccccggcagggcccattttcagaaatggttaatggacgggacggtcctgtgcaagctgataaatagtttatacccaccaggacaagagcccatacccaagatctcagagtcaaagatggcttttaagcagatggagcaaatctcccagttcctaaaagctgcggagacctatggtgtcagaaccaccgacatctttcagacggtggatctatgggaagggaaggacatggcagctgtgcagaggaccctgatggctttaggcagcgttgcagtcaccaaggatgatggctgctatcggggagagccatcctggtttcacaggaaagcccagcagaatcggagaggcttttccgaggagcagcttcgccagggacagaacgtaataggcctgcagatgggcagcaacaagggagcctcccaggcgggcatgacagggtacgggatgcccaggcagatcatgtaggacgcggcatcctgcccctggtagagaggacgaatgttccacaccatggtctctacgaaaaagaaatagttagtcaccttctgaccttctcctctttctcaaagccttctgtccctggtttttgcaagtgctgcatttccgccgagaatccgcgttgcctactgctgccacctcctgttcatttagaactatgcaaagactccgcttccgttttcctgagctcctcgggccccagagtctctgtttgattatttatttatttatttatttatttgccaaaaattctcctcttcaacttatagaatgcacctaataaagtaattagtcttgtgtcttaaaaaaaaaaaaaaa

SEQ ID NO: 611 - DNA, 343 bp, Homo sapiens
  modified_base (16)..(16): a, c, t or g
  modified_base (84)..(84): a, c, t or g
  modified_base (168)..(168): a, c, t or g
  modified_base (170)..(170): a, c, t or g
  modified_base (179)..(179): a, c, t or g
  modified_base (190)..(190): a, c, t or g
  modified_base (197)..(197): a, c, t or g
  modified_base (237)..(237): a, c, t or g
  modified_base (243)..(243): a, c, t or g
  modified_base (253)..(253): a, c, t or g
  modified_base (286)..(286): a, c, t or g
  modified_base (299)..(299): a, c, t or g
  modified_base (319)..(319): a, c, t or g
  modified_base (330)..(330): a, c, t or g
tttttctcattttaanttataatttttattgaggtaaaatatacataaaacaacatttttatcagagtcctatagatggttaanaaaattcaccattttaaccatctcttaaagtctacaatttagcagcatttaatacattcataacgtacaaccatcacttctgtntncttccaaanccttcatcacnccagaangagaccccgcgcccgttcaacaccatccccccaccctcantccccnacagtcactnccctgcttcccactcaaagtcaccgacactttnaaaatgtgctatnttataaaacttttttcccantatacattttntcttttatcactc

SEQ ID NO: 612 - DNA, 2617 bp, Homo sapiens
ctcgctgcccaggcccccgacgccgcggcaggagccccccaagagcgcgggaagccccgtggacctggcgctcccggctcgggcgtggacggggcgggcgccggggcggggcgcgcgtcctcgcgggtctgaatggaagggtcgaggtcgtcgtcggcggcgagcagatcctgaagccagaactccaccccggcgcccgcgccatgcggcgggagaggtgcggcgccccccacccgcgtcgccgccatggaggtgctgcggcgctcctcggtcttcgccgccgagatcatggacgcctttgaccgctcgcccacagacaaggagctggtggcccaggccaaggcgctgggccgggagtacgtgcacgcgcggctgctgcgcgccggcctctcctggagcgcgcccgagcgtgccgcgccggtcccgggacgcctggctgaggtgtgcgcggtgctgctgcgcctgggcgatgagctggagatgatccggcccagcgtctaccgcaacgtggcgcgtcagctgcacatctccctgcagtctgagcctgtggtgaccgatgcgttcctggccgtggctggccacatcttctctgcaggcatcacgtggggcaaggtggtgtccctgtatgcggtggccgcggggctggccgtggactgtgtgaggcaggcccagcctgccatggtccacgccctcgtggactgcctgggggagttcgtgcgcaagaccctggcaacctggctgcggagacgcggcggatggactgatgtcctcaagtgtgtggtcagcacagaccctggcctccgctcccactggctggtggctgcactctgcagcttcggccgcttcctgaaggctgccttcttcgtgctgctgccagagagatgagctgcccacctggcagtggccgcagcctggccctctgggcccaacgcaggaggccctcagcacccgaacacatcttcctcctccccacccgagcctggagcactctaaccctcggagaccccctaagccccgttcctccgcagacccaggccctccggaaggggtgagtggggaggggctttcctgagcctggagctgggctttggggcagcctgcgaccctccccgcttgtgtcccttctcctgtgatctctgtgttttcccttttctttctggggccaggaagtcagggtcaactcccaggcctcagatgcaggggcccagaacacctgctctcacctgagccccaggtgaaggggcccgggaacacctgctctcacctgagccccaggtgaaggggcccgggaacacctgctctcacctgaaccccaggtgaaggggcccggaacacctgctctcacctgagccccaggtgaaggggcccggaacacctgctctcacctgagccccaggtgaaggggcccgggaacacctgctctcacctgagccccaggtgaaggggcccgggaacacctgctctcacctgaaccccaggtgaaggggcccagaacacctgctctcacctgagccccaggtgaaggggcccggaacacctgctctcacctgagccccaggtgaaggggcccgggaacacctgctctcacctgagcccctggtgaaggggcccggaacacttgctctcacctgagccccaggtgaaggggcccggaacacctgctctcacctgagcccccggtgaaggggcccggaacacttgctctcacctgagccccaggtgaaggggcccggaacacctcctctcacctgagccccaggtgaaggggcccggaacacctcctgtcacctgagccccaggtgaaggggcccgggaacacctctcacctgaacccgggggtcccatcccaggaagaagggccatctcaggacatgagtcctcaggggccctgcacattcaatctgaaggtgaccctggcctggctgaagctggaagagctgtggggactcagcctgtaaacagagcgtaaggttcacatgctggttgcttaatccgtttctggaggaagagtatgacacccacttgtgatggggtccttgtgcggtggggaccggggccggcgggctccaggccagcacacctaacccatggatgtggaacctacggccgagaaggaatgttgcatgagtcggatcccagtccattgtcagtggagggtgagggtgaccccatctgctatttttgtgctcatcctcatacaaccatttggggatgtgcctattagggctccgtaagaactcagatgcctgggaagcccagcccctcaggtgcccccacacacagccttcccttgacgcctacatttctaggcacatgtgaggcatctttcctggagccccgagccagccctgtccctccccagtgcagcatggcactcaggagatacaggctggacatggggcagtcgttctggggaggcctggcctagcagccacccacctgagccctcccggccaggcttcgtgctggggtgggccatgtgccaggacaggagggtcccggcggaaagccagccccggactcatcgtgacattgagatcccactggagggtaggggtggtaataaacttctccaaacgatcgttgtcattttagacagaaaaaaaaaaaaaaaaaa

SEQ ID NO: 613 - DNA, 386 bp, Homo sapiens
  modified_base (196)..(196): a, c, t or g
  modified_base (208)..(208): a, c, t or g
  modified_base (278)..(278): a, c, t or g
  modified_base (301)..(301): a, c, t or g
  modified_base (333)..(333): a, c, t or g
  modified_base (378)..(378): a, c, t or g
  modified_base (384)..(384): a, c, t or g
tatttcacaatcatctttattacagtaggatgatggtcctgggccaccagcctaaaccttgcagccttaggaaagacctgtgtcaacagggcttgcctccctctctagacaggggctcagcacctccagggcatccctgctgcattttccctgctggaggatggggcagagggacaatgggagaggagggcatgancccaccccaggntatagcagctccttggccacaaagatccttttgccagtagcagaaagggaggaaaacaagcaaccaccangggttaccaccacttgtgggatncgccaggaccccattacgtgcctccttaaagnttgtgctcaaaaggcaattaataaaattaaaatggaggcctttcngcaggnaa

SEQ ID NO: 614 - DNA, 334 bp, Homo sapiens
  modified_base (172)..(172): a, c, t or g
  modified_base (177)..(177): a, c, t or g
  modified_base (320)..(320): a, c, t or g
  modified_base (326)..(326): a, c, t or g
tgcatttggattggggtccctctaaaatttaatgcatgatagacacatatgagggggaatagtctagatggctcctctcagtactttggaggcccctatgtagtccgtgctgacagctgctcctagagggaggggcctaggctcagccagagaagctataaattcctctttnctttnctttctgctcagcttctcctgtgtgattgacagctttgctgcttgaaggctcattttaatttattaattgctttgagcacaactttaagaggacgtaatggggtcctggccatcccacaagtggttgggtaaacccctgggtngggttngctggttt

SEQ ID NO: 615 - DNA, 2095 bp, Homo sapiens
gcgcctgtcagggaagcggcgcgcgcgcgcgggcggcgggcgggctggggatccgccgcgcagtgccagcgccagcgccagacccgcgccccgcgctctccggcccgtcgcctgccttgggactcgcgagcccgcactcccgccctgcctgttcgctgcccgagtatggagctgctgtgttgcgaaggcacccggcacgcgccccgggccgggccggacccgcggctgctgggggaccagcgtgtcctgcagagcctgctccgcctggaggagcgctacgtaccccgcgcctcctacttccagtgcgtgcagcgggagatcaagccgcacatgcggaagatgctggcttactggatgctggaggtatgtgaggagcagcgctgtgaggaggaagtcttccccctggccatgaactacctggatcgctacctgtcttgcgtccccacccgaaaggcgcagttgcagctcctgggtgcggtctgcatgctgctggcctccaagctgcgcgagaccacgcccctgaccatcgaaaaactgtgcatctacaccgaccacgctgtctctccccgccagttgcgggactgggaggtgctggtcctagggaagctcaagtgggacctggctgctgtgattgcacatgatttcctggccttcattctgcaccggctctctctgccccgtgaccgacaggccttggtcaaaaagcatgcccagacctttttggccctctgtgctacagattatacctttgccatgtacccgccatccatgatcgccacgggcagcattggggctgcagtgcaaggcctgggtgcctgctccatgtccggggatgagctcacagagctgctggcagggatcactggcactgaagtggactgcctgcgggcctgtcaggagcagatcgaagctgcactcagggagagcctcagggaagcctctcagaccagctccagcccagcgcccaaagccccccggggctccagcagccaagggcccagccagaccagcactcctacagatgtcacagccatacacctgtagccctggagaggccctctggagtggccactaagcagaggaggggccgctgccacccacctccctgcctccaggaaccacaccacatctaagcctgaaggggcgtctgttcccccttcacaaagcccaagggatctggtcctacccatccccgcagtgtgcactaaggggcccggccagccatgtctgcatttcggtggctagtcaagctcctcctccctgcatctgaccagcagcgcctttcccaactctagctgggggtgggccaggctgatgggacagaattggatacatacaccagcattccttttgaacgcccccccccacccctgggggctctcatgttttcaactgccaaaatgctctagtgccttctaaaggtgttgtcccttctagggttattgcatttggattggggtccctctaaaatttaatgcatgatagacacatatgagggggaatagtctagatggctcctctcagtactttggaggcccctatgtagtccgtgctgacagctgctcctagagggaggggcctaggcctcagccagagaagctataaattcctctttgctttgctttctgctcagcttctcctgtgtgattgacagctttgctgctgaaggctcattttaatttattaattgctttgagcacaactttaagaggacataatgggggcctggccatcccacaagtggtggtaaccctggtggttgctgttttcctcccttctgctactggcaaaaggatctttgtggccaaggagctgctatagcctggggtggggtcatgccctcctctcccattgtccctctgccccatcctccagcagggaaaatgcagcagggatgccctggaggtggctgagcccctgtctagagagggaggcaagccctgttgacacaggtctttcctaaggctgcaaggtttaggctggtggcccaggaccatcatcctactgtaataaagatgattgtgaaataaaactggctttggcttcttggaaaaaaaaaaaaaaaaaaaaaaaaaaaaaaaaaaaaaaaaaaaaa

SEQ ID NO: 616 - DNA, 391 bp, Homo sapiens
  modified_base (100)..(100): a, c, t or g
  modified_base (311)..(311): a, c, t or g
ttttagaacatcttaaatttttaatcctttctttacaggttacctagaccacttttgattaagaaaactgtagaaagttagtaactgccacaagcgaacncaggcggtggcacgtgtcaatttccacagagtcctgctttgcggggtgtctgaatgcactgcacggggtctctgctcacacttgctggaaccaatcgtggcagattttagtccacaggtcgcttttccccatatttctttgtaaactcttcagcattcttacagaattttttacggtccctaagagtattcttcagctaagtcaagcccgnaaccgggtgctcaggctgggggtcaatcaaccagtggctaatggaggggacctgggattacttgggtccgggttttgggt

SEQ ID NO: 617 - DNA, 248 bp, Homo sapiens
  modified_base (12)..(12): a, c, t or g
  modified_base (28)..(28): a, c, t or g
  modified_base (52)..(52): a, c, t or g
  modified_base (228)..(229): a, c, t or g
  modified_base (241)..(241): a, c, t or g
  modified_base (243)..(243): a, c, t or g
atttcggcaccngggtgggagcggccanagcgaggctgatgaaggagcagtntgaaatccgcaaatgtgggatgaaaaacttccgtaacatccaggttgatgaagctaatttattgacttggcaagggcttattgttcctgacaaccctccatatgataagggagccttcagaatcgaaatcaactttccagcagagtacccattcaaaccaccgaagatcacatttnnaacaaagatctntnttccc

SEQ ID NO: 618 - DNA, 3016 bp, Homo sapiens
gctccaggaagtgcgggggctccagccgcccggccggccgcgatgcattctggggaaggagcagcaccaaatccaagatggcggccagcaggaggctgatgaaggagcttgaagaaatccgcaaatgtgggatgaaaaacttccgtaacatccaggttgatgaagctaatttattgacttggcaagggcttattgttcctgacaaccctccatatgataagggagccttcagaatcgaaatcaactttccagcagagtacccattcaaaccaccgaagatcacatttaaaacaaagatctatcacccaaacatcgacgaaaaggggcaggtctgtctgccagtaattagtgccgaaaactggaagccagcaaccaaaaccgaccaagaaacttcagcgttcccaattatggcttctctcagatccagccttgaagttctttgacctcctcaattcacaacctgtagctgactttagccacccacaagtacagaaaataatccagtccctcatagcactggtgaatgacccccagcctgagcacccgcttcgggctgacctagctgaagaatactctaaggaccgtaaaaaattctgtaagaatgctgaagagtttacaaagaaatatggggaaaagcgacctgtggactaaaatctgccacgattggttccagcaagtgtgagcagagaccccgtgcagtgcattcagacaccccgcaaagcaggactctgtggaaattgacacgtgccaccgcctggcgttcgcttgtggcagttactaactttctacagttttcttaatcaaaagtggtctaggtaacctgtaaagaaaggattaaaaatttaagatgttctagttctgctctctttgttttaaaaatcactgcttcaatctacttcaaaagaatggtgtttcttttcttgtccaattttatccaaaatcttcaagttacatttaacccataaggtttaaaaaaaaggaaaaaaaacggttgtggttccctttcttccctacccttgccactcccactttctggcaccgagtttatttttcacttacttacttccccagaccccgggctcgcctccacaaaggagaagagactgccctggcggtcctggtggcttttcttagcatgtgtggcactgttgcccagtgtgggagttggtttaaattctcctgactccagtttataacatccttttaaaaaatttaaaaacaaacagccacacccctcctccagtccttctcctcagttcttgtgtgaaactccagctgatgttaccacagtaacatcagttaattgggcaagccctgatgtcagtgtgtgtaactgacctctggcctggcctgcacagagaagccctataatcacaggtctgtggtggccccgaaatggggggcctgctagtcaggaggatgctgtgcacactgtgtgtgatgaatctcgccagaaaggctcctgaggtcccaggttggcacttctccctgcagccattgtagaagatctgctggtccttgcaggcaaagctacagccagaatgtccgtttgaaactcctagctcatctgtcaccgagcttcatccgaatgtgccacggagcttgctctccacttcctccgtgcagtggccctgccacagccctccctcggcacactttgaccctttgtaggattggaattagcaggactcggctatttaaagcaccagtctggggtcgcctgggcccctgctgaccccctcctccagagcagccagcccagcccgggaacaagacggacttcctctcccttcggactcacagcctttgcagagtcaagctccacttgaagctcactcagtaatatcctttcaatgtgttttatattgttttgactgcctttttttgtagaaataaaaattgaccttagaatttatcgtcagataaacttgtaaagatttgaatattaatgtcttttcaaggcaaatgggattgtccccgcactagtagagaatccatgtcgctctgacaccccaaggaagccgacgatccaaatgccgtgtgtcaccaaccccgcttctgccactggcggcttcccttcttggctcttgggggggactagatcctgtggagaagatgacttaaactttgctttttgttttaattttaattctataacttgagatctttccggggcctacaggcgtgtaagacagcttggtctggtctgtgcagaagtggggagtgatgggcaggttcggcagcctaacattgttcaggcgcatggcccctgcggtgtgtacacgaactcggcttcttttgtcctaggtacgccaagggcaggtttctggagactcccttgtgcccgggatggcaagggcaccgggctggcgtttccacatctgtcttcattagcagaaaagtgatgatggattttatttcactcacactccagtttgtaataaaatgccaaattctgtcagctatccaaacaagccaccatttgttcttgttgcttctctggatccagaaatgttgccattcttggaaactgtcccattgcttcgtatttctgccaacgtagctctgcctgcctgtcaacccctcactgcactctgctcatcacgggaggatacctgtgtgccggcagcccctcagggactctcagccctggcactggcaccccagggttggccccgtcagcagaggcttggctttcgagccagtgggtgtctctcctttgggcctgggcggcttgctcctgccagccatgccttcagggtaggctctgagcaagctggcgaacagccctggctgctccaaaaccaaaaagctgggtcctctggaggaggggcgagctgtggagcagccacccactgctgccccaagctcactcaggaattcacacccgcctggtttcttgaagtgtgctgggtccttccctctgctccctactccccaccacggcagagaataggctttctaagatgctgcgatcccgttctgctgcccgtaataaaaatgctctcagacactg

SEQ ID NO: 619 - DNA, 419 bp, Homo sapiens
  modified_base (317)..(317): a, c, t or g
  modified_base (348)..(348): a, c, t or g
  modified_base (358)..(358): a, c, t or g
  modified_base (364)..(364): a, c, t or g
  modified_base (388)..(388): a, c, t or g
  modified_base (412)..(412): a, c, t or g
ttttttttttttttttatattcacaaatggttttatttcagaaagaaattacacattacaaagagacatagttaagagcttacattcacatatggaagtgaatctaagaaagtcaacaattattaatatacaaaaccacatgattaaaaaagacagtaacataatgacagatgggcttgatttagattcatacacaaaataatatcttttgtttaaaaacaaagagatattggtcttaagatagctctttagaaacaagttggtagttccaatgaactttaaaatcaaagcgatcataacagtcctttatgtaggcnggtatcacaccccacactcatccggcagggnggggaaaggnatcccntccaatttatacccctggcaggcnaagatagggatggctttcccactnatccttt

SEQ ID NO: 620 - DNA, 235 bp, Homo sapiens
gcttcaaaaacccgatgtggtgggtatcaggaggcagcggcttaagggcgatgctgggtttacaaaagattagtggaagacatcctatctagctgcaaggtataattgatggattcttccatcctgccggatgagtgtgggtgtgatacagcctacataaagactgttatgatcgctttgattttaaagttcattggaactaccaacttgtttctaaagagctatcttaagacca

SEQ ID NO: 621 - DNA, 2501 bp, Homo sapiens
cgaaaagattcttaggaacgccgtaccagccgcgtctctcaggacagcaggcccctgtccttctgtcgggcgccgctcagccgtgccctccgcccctcaggttctttttctaattccaaataaacttgcaagaggactatgaaagattatgatgaacttctcaaatattatgaattacatgaaactattgggacaggtggctttgcaaaggtcaaacttgcctgccatatccttactggagagatggtagctataaaaatcatggataaaaacacactagggagtgatttgccccggatcaaaacggagattgaggccttgaagaacctgagacatcagcatatatgtcaactctaccatgtgctagagacagccaacaaaatattcatggttcttgagtactgccctggaggagagctgtttgactatataatttcccaggatcgcctgtcagaagaggagacccgggttgtcttccgtcagatagtatctgctgttgcttatgtgcacagccagggctatgctcacagggacctcaagccagaaaatttgctgtttgatgaatatcataaattaaagctgattgactttggtctctgtgcaaaacccaagggtaacaaggattaccatctacagacatgctgtgggagtctggcttatgcagcacctgagttaatacaaggcaaatcatatcttggatcagaggcagatgtttggagcatgggcatactgttatatgttcttatgtgtggatttctaccatttgatgatgataatgtaatggctttatacaagaagattatgagaggaaaatatgatgttcccaagtggctctctcccagtagcattctgcttcttcaacaaatgctgcaggtggacccaaagaaacggatttctatgaaaaatctattgaaccatccctggatcatgcaagattacaactatcctgttgagtggcaaagcaagaatccttttattcacctcgatgatgattgcgtaacagaactttctgtacatcacagaaacaacaggcaaacaatggaggatttaatttcactgtggcagtatgatcacctcacggctacctatcttctgcttctagccaagaaggctcggggaaaaccagttcgtttaaggctttcttctttctcctgtggacaagccagtgctaccccattcacagacatcaagtcaaataattggagtctggaagatgtgaccgcaagtgataaaaattatgtggcgggattaatagactatgattggtgtgaagatgatttatcaacaggtgctgctactccccgaacatcacagtttaccaagtactggacagaatcaaatggggtggaatctaaatcattaactccagccttatgcagaacacctgcaaataaattaaagaacaaagaaaatgtatatactcctaagtctgctgtaaagaatgaagagtactttatgtttcctgagccaaagactccagttaataagaaccagcataagagagaaatactcactacgccaaatcgttacactacaccctcaaaagctagaaaccagtgcctgaaagaaactccaattaaaataccagtaaattcaacaggaacagacaagttaatgacaggtgtcattagccctgagaggcggtgccgctcagtggaattggatctcaaccaagcacatatggaggagactccaaaaagaaagggagccaaagtgtttgggagccttgaaagggggttggataaggttatcactgtgctcaccaggagcaaaaggaagggttctgccagagacgggcccagaagactaaagcttcactataatgtgactacaactagattagtgaatccagatcaactgttgaatgaaataatgtctattcttccaaagaagcatgttgactttgtacaaaagggttatacactgaagtgtcaaacacagtcagattttgggaaagtgacaatgcaatttgaattagaagtgtgccagcttcaaaaacccgatgtggtgggtatcaggaggcagcggcttaagggcgatgcctgggtttacaaaagattagtggaagacatcctatctagctgcaaggtataattgatggattcttccatcctgccggatgagtgtgggtgtgatacagcctacataaagactgttatgatcgctttgattttaaagttcattggaactaccaacttgtttctaaagagctatcttaagaccaatatctctttgtttttaaacaaaagatattattttgtgtatgaatctaaatcaagcccatctgtcattatgttactgtcttttttaatcatgtggttttgtatattaataattgttgactttcttagattcacttccatatgtgaatgtaagctcttaactatgtctctttgtaatgtgtaatttctttctgaaataaaaccatttgtgaatataaaaaaaaaaaaaaaaaaaaaaaaaaaaaaaaaaaaaaaaaaaaaaaaaaaaaaaaaaaaaaa

SEQ ID NO: 622 - DNA, 204 bp, Homo sapiens
  modified_base (73)..(73): a, c, t or g
  modified_base (94)..(94): a, c, t or g
  modified_base (140)..(140): a, c, t or g
  modified_base (197)..(197): a, c, t or g
ttttttttttttttttttttttttttttttttttttttcattcagatttacccaggaggttgctgtctttcanacaaagatgaggttcactggnaggaggcaaaggtgggactagggaggtgacccgcatgggccagatnggagagaaactcttcccaccccggcagaaggggcctcttcctggccgccccatccanactcagg

SEQ ID NO: 623 - DNA, 457 bp, Homo sapiens
  modified_base (91)..(91): a, c, t or g
  modified_base (254)..(254): a, c, t or g
  modified_base (367)..(367): a, c, t or g
  modified_base (457)..(457): a, c, t or g
caggacgcctacgacatcagccagctgcgtcacccgacagcgctgagcctgcctctgggaccgccgccacttcgcagagatgccccgcagncagcctgcacccccagccaccccgagtgctgcccaccagccccctggacatcgccgacttcatcaatgatggcttggaggctgcagatagtgaccccagtgtgccgccttacgacacagccctcatctatgactacgagggtgacggctcggtggcggggacntgagctccatcctgtccagccagggcgatgaggaccaggactacgactacctcagagactgggggccccgcttcgcccggctggcagacatgtatgggcacccgtgcgggttnggagttacggggccagatgggaccaccaggccagggagggtctttctcctggggcactgctacccagacacagaggccggacagcctgan

SEQ ID NO: 624 - DNA, 2875 bp, Homo sapiens
acttgcgctgtcactcagcctggacgcgcttcttcgggtcgcgggtgcactccggcccggctcccgcctcggccccgatggacgccgcgttcctcctcgtcctcgggctgttggcccagagcctctgcctgtctttgggggttcctggatggaggaggcccaccaccctgtacccctggcgccgggcgcctgccctgagccgcgtgcggagggcctgggtcatccccccgatcagcgtatccgagaaccacaagcgtctcccctaccccctggttcagatcaagtcggacaagcagcagctgggcagcgtcatctacagcatccagggacccggcgtggatgaggagccccggggcgtcttctctatcgacaagttcacagggaaggtcttcctcaatgccatgctggaccgcgagaagactgatcgcttcaggctaagagcgtttgccctggacctgggaggatccaccctggaggaccccacggacctggagattgtagttgtggatcagaatgacaaccggccagccttcctgcaggaggcgttcactggccgcgtgctggagggtgcagtcccaggcacctatgtgaccagggcagaggccacagatgccgacgaccccgagacggacaacgcagcgctgcggttctccatcctgcagcagggcagccccgagctcttcagcatcgacgagctcacaggagagatccgcacagtgcaagtggggctggaccgcgaggtggtcgcggtgtacaatctgaccctgcaggtggcggacatgtctggagacggcctcacagccactgcctcagccatcatcacccttgatgacatcaatgacaatgcccccgagttcaccagggatgagttcttcatggaggccatagaggccgtcagcggagtggatgtgggacgcctggaagtggaggacagggacctgccaggctccccaaactgggtggccaggttcaccatcctggaaggcgaccccgatgggcagttcaccatccgcacggaccccaagaccaacgagggtgttctgtccattgtgaaggccctggactatgagagctgtgaacactacgaactcaaagtgtcggtgcagaatgaggccccgctgcaggcggctgcccttagggctgagcggggccaggccaaggtccgcgtgcatgtgcaggacaccaacgagccccccgtgttccaggagaacccacttcggaccagcctagcagagggggcacccccaggcactctggtggccaccttctctgcccgggaccctgacacagagcagctgcagaggctcagctactccaaggactacgacccggaagactggctgcaagtggacgcagccactggccggatccagacccagcacgtgctcagcccggcgtcccccttcctcaagggcggctggtacagagccatcgtcctggcccaggatgacgcctcccagccccgcaccgccaccggcaccctgtccatcgagatcctggaggtgaacgaccatgcacctgtgctggccccgccgccgccgggcagcctgtgcagcgagccacaccaaggcccaggcctcctcctgggcgccacggatgaggacctgcccccccacggggcccccttccacttccagctgagccccaggctcccagagctcggccggaactggagcctcagccaggtcaacgtgagccacgcgcgcctgcggccgcgacaccaggtccccgaaggcctgcaccgcctcagcctgctgctccgggactcggggcagccgccccagcagcgcgagcagcctctgaacgtgaccgtgtgccgctgcggcaaggacggcgtctgcctgccgggggccgcagcgctgctggcggggggcacaggcctcagcctgggcgcactggtcatcgtgctggccagcgccctcctgctgctggtgctggtcctgctcgtggcactccgggcgcggttctggaagcagtctcggggcaaggggctgctgcacggcccccaggacgaccttcgagacaatgtcctcaactacgatgagcaaggaggcggggaggaggaccaggacgcctacgacatcagccagctgcgtcacccgacagcgctgagcctgcctctgggaccgccgccacttcgcagagatgccccgcagggccgcctgcacccccagccaccccgagtgctgcccaccagccccctggacatcgccgacttcatcaatgatggcttggaggctgcagatagtgaccccagtgtgccgccttacgacacagccctcatctatgactacgagggtgacggctcggtggcggggacgctgagctccatcctgtccagccagggcgatgaggaccaggactacgactacctcagagactgggggccccgcttcgcccggctggcagacatgtatgggcacccgtgcgggttggagtacggggccagatgggaccaccaggccagggagggtctttctcctggggcactgctacccagacacagaggccggacagcctgaccctggggcgcaactggacatgccactccccggcctcgtggcagtgatggcccctgcagaggcagcctgaggtcaccgggcccgacccccctgggcctggggcagcctccttcctgtaggcgagggcccaagtctgggggcagaacctgagtgtggatggggcggccaggaagaggccccttcctgccggggtgggaagagtttctctccatcggccccatgcgggtcacctccctagtcccacctttgcctcctaccagtgaacctcatctttgtatgaaagacagcaacctcctgggtaaatctgaatgaaaaacgtgctagtctctttcatgcaaaaaaaaaaaaaaaaa

SEQ ID NO: 625 - DNA, 405 bp, Homo sapiens
  modified_base (210)..(210): a, c, t or g
  modified_base (375)..(375): a, c, t or g
ttttttttaaggtaacaaatttctggtttatttcaaatgtatacatatactcaacacttatagaggtttgctctctggttttactctcatcttgccacatgactataaacaaaaagacatccctttttcattagagatccatctgttctgtgatttttttaccttgtgatttataaaaattaggacctaaatctataatataaacttctnggatgccagtcttactcatagctggacacattttagatcctactggaaaactaagcaaatgcctcttatttcaataatccaaaacttaacatactcttaggtaaattcttactttggctttattcacaggaacacaggaccaccaggtggcaaaacaaggaaaanggcaccaggtccaaaggccagtggataagg

SEQ ID NO: 626 - DNA, 1542 bp, Homo sapiens
cgaccggcacgttcaccccatccctcaggctttatttattttttttcgacaggttcttttcaaggctccagtcaccgcagcagttgtccatgctgtagtttccactttcctgtatgggcgggctggttaggattccactttcccccaagtgcttagcccagggccagacaaaaagtagttgcttaagaaatacttgttgaaggaataaattaatgaatgaatttgtgcttacagcggctggatggcagacaaacctatgattataggaacatcaggatctcatttggaacagattacggatgctgcattgtggaacttggaaaaacaagagttcttggacaggtttcctgtgaacttgtgtctccaaaactcaatcgggcaacagaaggtattctttttttaaccttgaactctctcagatggccgctccagctttcgaacctggcaggcagtcagatctcttggtgaagttgaatcgactcatggaaagatgtctaagaaattcgaagtgtatagacactgagtctctctgtgttgttgctggtgaaaaggtttggcaaatacgtgtagacctacatttattaaatcatgatggaaatattattgatgctgccagcattgctgcaatcgtggccttatgtcatttccgaagacctgatgtctctgtccaaggagatgaagtaacactgtatacacctgaagagcgtgatcctgtaccattaagtatccaccacatgcccatttgtgtcagttttgcctttttccagcaaggaacatatttattggtggatcccaatgaacgagaagaacgtgtgatggatggcttgctggtgattgccatgaacaaacatcgagagatttgtactatccagtccagtggtgggataatgctactaaaagatcaagttctgagatgcagtaaaatcgctggtgtgaaagtagcagaaattacagagctaatattgaaagctttggagaatgaccaaaaagtaaggaaagaaggtggaaagtttggttttgcagagtctatagcaaatcaaaggatcacagcatttaaaatggaaaaggcccctattgatacctcggatgtagaagaaaaagcagaagaaatcattgctgaagcagaacctccttcagaagttgtttctacacctgtgctatggactcctggaactgcccaaattggagagggagtagaaaactcctggggtgatcttgaagactctgagaaggaagatgatgaaggcggtggtgatcaagctatcattcttgatggtataaaaatggacactggagtagaagtctctgatattggaagccaagatgctcccataatactctcagatagtgaagaagaagaaatgatcattttggaaccagacaagaatccaaagaaaataagaacacagaccaccagtgcaaaacaagaaaaagcaccaagtaaaaagccagtgaaaagaagaaaaaagaagagagctgccaattaaagctaacagttgtatatctgtatatataactattaaaagggatatttattccatt

SEQ ID NO: 627 - DNA, 438 bp, Homo sapiens
  modified_base (422)..(422): a, c, t or g
ttttttttgtgcttcttatgtttctctgtgctgtattctggaagtggtcggataccatcgtctgagctgggactattctgataagatttctctgctatggaggagcctgactcactttcactgtccagattctggggggtatatgctggtgacttactatggctgggagagccacgctcatgctttggagtggaaccactgatgagtggagagccatagtttttagaagaagccatttgaggcctaagcccttctccactactttccccaggtttctgcaaagtcactttggctttaatgctaggggagcctccatcatgcttactgatgataatttttgccacacctgtgctccccacattttttgactctgaggtcttcttaggaagaatccactgaactcccggagtgggaaacctttngatttgtctttatcac

SEQ ID NO: 628 - DNA, 380 bp, Homo sapiens
tcaggcagcaaaagccaccatagccattcttcctcctcttcctcatctgcttccacctcagggaagatgaaaagcagtaaatcagaaggttcatcaagttccaagttaagtagcagtatgtattctagccaggggtcttctggatctagccagtccaaaaattcatcccagtctggggggaagccaggctcctctcccataaccaagcatggactgagcagtggctctagcagcaccaagatgaaacctcaaggaaagccatcatcacttatgaatccttctttaagtaaaccaaacatatccccttcttcattcaagggccacctgggaggcttcttgacaagctttgccttcttcccaatggaagcctgttcctgggg

SEQ ID NO: 629 - DNA, 5809 bp, Homo sapiens
gggaagatggcggcggcctcgagcacccttctcttcttgccgccggggacttcagattgatccttcccgggaagagtagggactgctggtgccctgcgtcccgggatcccgagccaacttgtttcctccgttagtggtggggaagggcttatccttttgtggcggatctagcttctcctcgccttcaggatgaaagctcagggggaaaccgaggagtcagaaaagctgagtaagatgagttctctcctggaacggctccatgcaaaatttaaccaaaatagaccctggagtgaaaccattaagcttgtgcgtcaagtcatggagaagagggttgtgatgagttctggagggcatcaacatttggtcagctgtttggagacattgcagaaggctctcaaagtaacatctttaccagcaatgactgatcgtttggagtccatagcaagacagaatggactgggctctcatctcagtgccagtggcactgaatgttacatcacgtcagatatgttctatgtggaagtgcagttagatcctgcaggacagctttgtgatgtaaaagtggctcaccatggggagaatcctgtgagctgtccggagcttgtacagcagctaagggaaaaaaattttgatgaattttctaagcaccttaagggccttgttaatctgtataaccttccaggggacaacaaactgaagactaaaatgtacttggctctccaatccttagaacaagatctttctaaaatggcaattatgtactggaaagcaactaatgctggtcccttggataagattcttcatggaagtgttggctatctcacaccaaggagtgggggtcatttaatgaacctgaagtactatgtctctccttctgacctactggatgacaagactgcatctcccatcattttgcatgagaataatgtttctcgatctttgggcatgaatgcatcagtgacaattgaaggaacatctgctgtgtacaaactcccaattgcaccattaattatggggtcacatccagttgacaataaatggaccccttccttctcctcaatcaccagtgccaacagtgttgatcttcctgcctgtttcttcttgaaatttccccagccaatcccagtatctagagcatttgttcagaaactgcagaactgcacaggaattccattgtttgaaactcaaccaacttatgcacccctgtatgaactgatcactcagtttgagctatcaaaggaccctgaccccatacctttgaatcacaacatgagattttatgctgctcttcctggtcagcagcactgctatttcctcaacaaggatgctcctcttccagatggccgaagtctacagggaacccttgttagcaaaatcacctttcagcaccctggccgagttcctcttatcctaaatctgatcagacaccaagtggcctataacaccctcattggaagctgtgtcaaaagaactattctgaaagaagattctcctgggcttctccaatttgaagtgtgtcctctctcagagtctcgtttcagcgtatcttttcagcaccctgtgaatgactccctggtgtgtgtggtaatggatgtgcaggactcaacacatgtgagctgtaaactctacaaagggctgtcggatgcactgatctgcacagatgacttcattgccaaagttgttcaaagatgtatgtccatccctgtgacgatgagggctattcggaggaaagctgaaaccattcaagccgacaccccagcactgtccctcattgcagagacagttgaagacatggtgaaaaagaacctgcccccggctagcagcccagggtatggcatgaccacaggcaacaacccaatgagtggtaccactacaccaaccaacacctttccggggggtcccattaccaccttgtttaatatgagcatgagcatcaaagatcggcatgagtcggtgggccatggggaggacttcagcaaggtgtctcagaacccaattcttaccagtttgttgcaaatcacagggaacggggggtctaccattggctcgagtccgacccctcctcatcacacgccgccacctgtctcttcgatggccggcaacaccaagaaccacccgatgctcatgaaccttcttaaagataatcctgcccaggatttctcaaccctttatggaagcagccctttagaaaggcagaactcctcttccggctcaccccgcatggaaatatgctcggggagcaacaagaccaagaaaaagaagtcatcaagattaccacctgagaaaccaaagcaccagactgaagatgactttcagagggagctattttcaatggatgttgactcacagaaccctatctttgatgtcaacatgacagctgacacgctggatacgccacacatcactccagctccaagccagtgtagcactcccccaacaacttacccacaaccagtacctcacccccaacccagtattcaaaggatggtccgactatccagttcagacagcattggcccagatgtaactgacatcctttcagacattgcagaagaagcttctaaacttcccagcactagtgatgattgcccagccattggcacccctcttcgagattcttcaagctctgggcattctcagagtaccctgtttgactctgatgtctttcaaactaacaataatgaaaatccatacactgatccagctgatcttattgcagatgctgctggaagccccagtagtgactctcctaccaatcatttttttcatgatggagtagatttcaatcctgatttattgaacagccagagccaaagtggttttggagaagaatattttgatgaaagcagccaaagtggggataatgatgatttcaaaggatttgcatctcaggcactaaatactttgggggtgccaatgcttggaggtgataatggggagaccaagtttaagggcaataaccaagccgacacagttgatttcagtattatttcagtagccggcaaagctttagctcctgcagatcttatggagcatcacagtggtagtcagggtcctttactgaccactggggacttagggaaagaaaagactcaaaagagggtaaaggaaggcaatggcaccagtaatagtactctctcggggcccggattagacagcaaaccagggaagcgcagtcggaccccttctaatgatgggaaaagcaaagataagcctccaaagcggaagaaggcagacactgagggaaagtctccatctcatagttcttctaacagaccttttaccccacctaccagtacaggtggatctaaatcgccaggcagtgcaggaagatctcagactcccccaggtgttgccacaccacccattcccaaaatcactattcagattcctaagggaacagtgatggtgggcaagccttcctctcacagtcagtataccagcagtggttctgtgtcttcctcaggcagcaaaagccaccatagccattcttcctcctcttcctcatctgcttccacctcagggaagatgaaaagcagtaaatcagaaggttcatcaagttccaagttaagtagcagtatgtattctagccaggggtcttctggatctagccagtccaaaaattcatcccagtctggggggaagccaggctcctctcccataaccaagcatggactgagcagtggctctagcagcaccaagatgaaacctcaaggaaagccatcatcacttatgaatccttctttaagtaaaccaaacatatccccttctcattcaaggccacctggaggctctgacaagcttgcctctccaatgaagcctgttcctggaactcctccatcctctaaagccaagtcccctatcagttcaggttctggtggttctcatatgtctggaactagttcaagctctggcatgaagtcatcttcagggttaggatcctcaggctcgttgtcccagaaaactcccccatcatctaattcctgtacggcatcttcctcctccttttcctcaagtggctcttccatgtcatcctctcagaaccagcatgggagttctaaaggaaaatctcccagcagaaacaagaagccgtccttgacagctgtcatagataaactgaagcatggggttgtcaccagtggccctgggggtgaagacccactggacggccagatgggggtgagcacaaattcttccagccatcctatgtcctccaaacataacatgtcaggaggagagtttcagggcaagcgtgagaaaagtgataaagacaaatcaaaggtttccacctccgggagttcagtggattcttctaagaagacctcagagtcaaaaaatgtggggagcacaggtgtggcaaaaattatcatcagtaagcatgatggaggctcccctagcattaaagccaaagtgactttgcagaaacctggggaaagtagtggagaagggcttaggcctcaaatggcttcttctaaaaactatggctctccactcatcagtggttccactccaaagcatgagcgtggctctcccagccatagtaagtcaccagcatataccccccagaatctggacagtgaaagtgagtcaggctcctccatagcagagaaatcttatcagaatagtcccagctcagacgatggtatccgaccacttccagaatacagcacagagaaacataagaagcacaaaaaggaaaagaagaaagtaaaagacaaagatagggaccgagaccgggacaaagaccgagacaagaaaaaatctcatagcatcaagccagagagttggtccaaatcacccatctcttcagaccagtccttgtctatgacaagtaacacaatcttatctgcagacagaccctcaaggctcagcccagactttatgattggggaggaagatgatgatcttatggatgtggccctgattgggaattaggaaccttatttcctaaaagaaacagggccagaggaaaaaaaactattgataagtttataggcaaaccaccataaggggtgagtcagacaggtctgatttggttaagaatcctaaatggcatggctttgacatcaagctgggtgaattagaaaggcatatccagaccctattaaagaaaccacagggtttgattctggttaccaggaagtcttctttgttcctgtgccagaaagaaagttaaaatacttgcttaagaaagggaggggggtgggaggggtgtagggagagggaagggagggaaacagttttgtgggaaatattcatatatattttcttctccctttttccatttttaggccatgttttaaactcattttagtgcatgtatatgaagggctgggcagaaaatgaaaaagcaatacattccttgatgcatttgcatgaaggttgttcaactttgtttgaggtagttgtccgtttgagtcatgggcaaatgaaggactttggtcattttggacacttaagtaatgtttggtgtctgtttcttaggagtgactgggggagggaagattattttagctatttatttgtaatattttaaccctttatctgtttgtttttatacagtgtttcgttctaaatctatgaggtttagggttcaaaatgatggaaggccgaagagcaaggcttatatggtggtagggagcttatagcttgtgctaatactgtagcatcaagcccaagcaaattagtcagagcccgcctttagagttaaatataatagaaaaaccaaaatgatatttttattttaggagggtttaaatagggttcagagatcataggaatattaggagttacctctctgtggaggtat

SEQ ID NO: 630 - DNA, 580 bp, Homo sapiens
  modified_base (422)..(422): a, c, t or g
  modified_base (466)..(466): a, c, t or g
  modified_base (548)..(548): a, c, t or g
  modified_base (554)..(554): a, c, t or g
  modified_base (577)..(577): a, c, t or g
tccgggtacctcagtttctcctttattgctcctgtacgaacccctcccctcccccctgtaaacacagtgctgcgagatcgctggcagagaaggcttcctccagcggctgggtggtgaaggaccctggctcttctctcggggcgacccctcagtgctcggcagtcatactggggtgcgagagaggtgggcagcagctcagcctccccccgctgggagcgaaagtttcttggtctcagcttcatttccgtgaagggcaccgagaactcgaagcccttccagtggtaccagctcactccctgatggtccactgtgctcccgtagagcccgttgaggttggcgtagtgggcagttcctgtaccaccaggcccctcggtaggagacagcgcaggagatgagcaagctgttggggtcccgatcacggncagagaagacactgccgctgtggtagctcatggagtcccctgcngtgccgtggtagccctccaagttggaggcggtagtactccggaagccgaagtctacgtggaaggagtcgtactggggcgaanaaagcntcgttcccagcccgaagttcaanggg

SEQ ID NO: 631 - DNA, 590 bp, Homo sapiens
  modified_base (1)..(1): a, c, t or g
  modified_base (414)..(414): a, c, t or g
  modified_base (526)..(526): a, c, t or g
  modified_base (567)..(567): a, c, t or g
  modified_base (587)..(587): a, c, t or g
ngcggacttggaggccaaggaagtgaccccccgcaccgccctgctcacttggactgagcccccagtccggcccgcagctacctgctcagcttccacacccctggtggacagacccaggagatcctgctcccaggagggatcacatctcaccagctccttggcctctttccctccacctcctacaatgcacggctccaggccatgtggggcagagctcctgccgcccgtgtccacctctttcaccacgggtgggctgcggatccccttccccagggactgcggggacggagatgcagaacggagccggtgcctccaggaccagcaccatcttcctcaacggcaaccgcgagcgcccctgaacgtgttttgcgacatggagactgatgggggcggctggctggtgttccagcgccnaattggatggacagacagacttctggagggactgggaggactatgcccatggttttgggaacatctctggagagttctggctgggcaatgaggcctgcacagcctgacacangcaggtgactactccatgcgcgttgaactgcggctggggangaagctgtgttcgccaatanaat

SEQ ID NO: 632 - DNA, 13268 bp, Homo sapiens
ggtcctccccttctcctcccctgctcgctgcagactccctcctcactgtcgctgccgagatccacagtcggttgtggctcagcccctgttgcaggggacaagtgagggagacttccctgtcctgccctgagacgccgccctcccggggttggggacagagcaggtgcagaggcactgcagctgctcggttgcccagcctcctgaatgatgccagcccagtatgctctaacctccagcctggttctcctggtgctgctgagcacagccagagcaggccccttctcttcacggtccaatgtgacactgccagccccccggccccctccccagccagggggccacacagtgggggctggagtgggaagcccctcttctcagctttacgagcacacagtggaaggaggggagaagcaggtggtattcacccaccgcattaacctgcccccttccactggctgtggctgtcccccaggcaccgagcccccagtccttgcttcagaggtacaggccctgagggtccgtctagagatcctggaggagttggtgaaggggctcaaggaacagtgcactgggggatgttgtcctgcctctgcccaagctggcacaggtcagacagatgtgcggaccctctgcagtctccatggtgtgtttgatctgagccgctgcacctgttcctgtgagccaggctggggtgggcccacctgctcagaccccacagatgctgagatccctccctcttccccaccctcagcctcggggtcctgcccagatgactgcaatgatcagggtcgctgtgtccgtggtcgttgcgtgtgctttcccggctacactggccccagctgtggctggccatcctgtcccggggactgccaaggccgtgggcgctgcgtgcagggcgtgtgtgtgtgccgggcaggcttctcaggccccgactgcagccagcgctcctgccctcgaggttgcagccagaggggacgctgtgagggtgggcgctgcgtgtgtgacccaggctacactggtgacgactgtggcatgaggagctgccctcgcggttgcagtcagagggggcgctgtgagaatgggcgctgcgtgtgtaaccccggctacactggcgaggactgtggggtgaggagctgccctcggggctgcagccagcggggacgctgcaaggacgggcgctgcgtgtgtgaccccggctacactggcgaggactgtggtacgcggagctgcccctgggactgtggcgagggcgggcgctgcgtggacggccgctgcgtgtgctggcccgggtacacaggcgaggactgcagcacgcggacatgtccgagggactgccggggccgcgggcgctgcgaggacggcgaatgcatttgcgacacgggctacagcggggacgactgcggcgtgcgcagctgccctggcgactgcaaccaaaggggccgctgcgaggacggccgctgcgtgtgctggccggggtacactggaaccgattgcggctcgcgcgcctgcccacgcgactgtagaggtcgcgggcgctgcgagaacggcgtgtgtgtttgcaatgcgggctacagcggcgaggactgcggtgtgcgcagctgtcctggggactgtcgtggccggggccgctgtgagagtggccgctgcatgtgttggccggggtacacaggccgggactgcggcacgcgcgcctgtcctggcgactgtcgcgggcgcgggcgctgcgtggatggccgctgcgtgtgcaacccgggcttcaccggtgaggactgtgggagccgtcgctgtcccggggactgccgtgggcacggcctttgcgaggatggcgtgtgcgtgtgtgacgcaggctactcaggggaagactgcagcacgcgcagctgccccgggggctgccgaggccgcggccagtgcctagatgggcggtgtgtgtgcgaggacggctactctggcgaggattgcggtgtgaggcagtgcccgaatgactgcagccagcacggcgtgtgccaggacggtgtgtgcatctgttgggaaggctacgtgagtgaggactgcagcatccgcacctgcccctccaactgccacgggaggggccgctgtgaggaagggcgctgcctgtgcgacccaggctacaccggccctacctgtgccacccgcatgtgcccggctgactgccggggacgtgggcggtgtgtgcaaggagtgtgcctgtgccacgtgggctatggcggtgaggactgcgggcaggaagagcctccagccagcgcctgccctggaggctgcgggccccgggaactgtgccgggcaggccagtgtgtgtgtgtagagggcttccgaggccctgactgtgccatccagacatgcccaggggactgccgtggccgaggagagtgtcacgatggcagctgtgtctgcaaagatgggtatgctggcgaagactgcggagaagcacgggttccaagctctgcctcagcctatgaccagagaggactggcccctggacaggagtaccaggtcactgtccgagcccttcgagggaccagctggggccttcctgcctccaagaccatcaccaccatgatcgatgggccccaggacctccgagtggtggctgtgacaccgacaacactggagcttggctggctgcgtccccaggctgaggtggaccgatttgtggtgtcctacgtcagtgccggcaaccagagggtgaggctggaagtgccccctgaagcagacgggacgctgctgactgacctgatgccaggcgtagaatatgtggtgactgtcacagcggagcggggccgggcagtcagctacccagcttctgtcagggccaacacagaggaaagggaggaggagtccccgcccaggccaagcctgtcccagcccccacggcggccttggggcaacctgacggccgagctgagccgtttccgcggcacggtgcaggacctggagcgccacctgcgggctcacggctacccactgcgggccaaccagacttacacgtcggtggcgcgccacatccatgaatacttgcagcggcaggtgctgggcagttccgccgatggcgcgcttctcgtgtctctcgacgggctccgcggccagttcgagcgcgtggtgctgcgctggcggcctcagccgcctgcagagggccccggcggtgagctgactgtgccgggcaccacgcgcaccgtcagcctgcccgacctcaggcccggcaccacctaccacgtggaggtccacggggtgcgggcggggcagacctccaagtcctacgccttcatcaccaccacaggcccctcgacgacgcaaggggcccaggctcctctcctgcagcagcgcccccaggagctgggagagttgagggtgctgggcagagatgagacagggcgcctccgtgtggtctggaccgcccagcctgacacctttgcctacttccaactgcgcatgcgggtgcccgaggggccgggggcacatgaggaagtgctgccaggggacgtccgccaggctctggtgcctccaccccctcctggaaccccgtatgagctgtcacttcatggggtccctcctgggggcaagccctctgaccccatcatctaccaaggcattatggacaaggatgaggagaagcctgggaagtcctcaggcccaccacgcctgggtgagctgacggtgacagacaggacctccgactccttgctcctgcgctggacggtccccgagggcgagtttgactccttcgtgatccagtacaaagacagggacgggcagccccaggtggtgcccgtggaaggaccccagcgctcggccgtcatcacctccctggatcctggccgcaagtacaaatttgtcctgtatgggtttgttggcaagaagaggcatggtccgctggtggctgaagccaagatcttgcctcagagtgacccaagtccagggactccaccccacctgggaaacctgtgggtgacagaccctaccccagattcactgcacctctcctggactgtccctgagggccagtttgacaccttcatggtccagtacagggacagggatggacggccccaggtggtacctgtggaagggcccgagcgttcatttgttgtctcctcactggaccctgaccacaagtacagattcactctgtttggaattgcgaacaagaagcggtatggccccctcacggccgatggcaccactgctccagagaggaaagaggagcccccccgccctgagttcctggagcagcccctcctgggggaactgacagtgaccggcgtgaccccagactccttgcgtctctcatggacagtggcccagggccccttcgactcattcatggtccagtacaaggatgcacaggggcagccccaggcagtgcctgttgcgggggatgagaatgaggttactgtccccggcctggatcccgaccggaagtataagatgaacctctacgggcttcgtggcaggcagcgtgtggggcccgagtctgtggtggccaagactgctcctcaggaggatgtggacgagacccccagccccacagaactgggcacggaggccccggagtcccccgaggagccgctcctgggggagctgacagtgacaggatcctcccctgattcgctgagcctcttctggaccgtcccccagggcagcttcgactctttcaccgtgcagtacaaggacagggatgggcggccccgggcggtgcgtgttgggggcaaggagagtgaggtcaccgtgggaggcctagagcccgggcacaagtacaagatgcacctgtacggcctccacgaggggcagcgcgtgggcccggtgtccgccgtgggcgtgacagccccacaacaagaagagacccctccagccactgagtccccgctggagccacgcctaggagagctgacagtgacagatgtgacccccaactctgtgggcctctcctggacagtccccgagggccagtttgactccttcatagtccagtacaaggacaaggacgggcagccccaggtggtgccggtggcggcagaccagcgagaggtcacagtctacaacctggagcctgagagaaaatataagatgaacatgtatggactacatgatgggcaacgcatgggccccctgtctgtggtcatcgtgacggccccagccacagaggcctccaagcctcccctggagccacgcctaggggagctgacagtgacggatataacccctgactctgtgggcctctcatggacagtccctgagggtgaattcgactcctttgtggttcagtacaaggacagggacgggcagccccaggtggtgcccgtggctgcagatcagcgggaggtcactatccctgacctggaaccctcccgcaagtacaagttcctgctctttgggatccaggatgggaaacgacgcagcccagtctctgtggaggcaaagacggttgcccgaggtgacgccagcccaggggccccaccccgccttggggagctgtgggtgacagaccccaccccagactcactgcgcctctcctggacggttcctgagggccagttcgactcttttgtggtccagttcaaggacaaagacgggccccaggtggtgcccgtggagggccatgagcgctctgtcactgtcacccctctggatgccggccgcaagtacagattcctcctctatggcctcctgggcaagaagcgccatggccctctcactgccgacggcaccacggaagcccggagtgctatggatgatactggaacaaagcgtcccccaaaaccccgtctgggggaggagctgcaggtgaccaccgtgacccagaactccgtgggcctctcctggacagtccctgagggccagtttgactcctttgtggtccagtacaaagacagggacgggcagccccaggtggtgcccgtggagggcagcctcagggaggtcagcgtgccgggcctggaccctgcccacaggtacaagctgctgctctacgggctgcaccacggcaagcgtgtgggccccatctcggccgtcgccattactgccggcagggaagaaacggaaactgagaccacggccccgacccctccagcgcctgagccccacctcggggagttgacagtggaggaggccacgtcacacaccctgcatctctcctggatggtgactgagggagaatttgactccttcgaaatccagtacacagatagagacgggcaactccaaatggtccgcataggaggtgaccggaatgacatcaccctctctggcctggaatccgaccacagatacctggtgaccctgtatggtttcagtgatgggaagcatgtaggtcctgtccatgtcgaggccctgacagtcccggaggaggagaagccttcagaacctcccaccgcaacccccgagccccccatcaagcctcgcctgggggagctgaccgtgacagatgccacccctgactccctcagcctgtcctggacagttcccgagggacagtttgaccacttcctggtccagtacaggaatggagatgggcagcccaaggcagtgagggtgccagggcacgaggaaggggtcaccatctcgggcctggagccagaccataaatacaagatgaacctgtacggcttccacggtggccagcgcatgggccctgtgtctgtcgtcggggtgacagaacccagcatggaggccccggagcccgctgaggagccgctcctgggggagctaacagtgacaggatcctcccctgactcgctgagcctctcctggaccgtcccccagggccgcttcgactccttcaccgtgcagtacaaggacagggacgggcggccccaggtggtgcgtgttgggggcgaggagagtgaagtcaccgtggggggcctggagcctgggcgcaagtacaagatgcacctgtacggcctccacgaggggcggcgcgtgggcccagtgtctgctgtgggcgtcacggcccccgaagaggagtcccctgatgctcctcttgcaaagctgcgcctagggcagatgacagtgagagacatcacctccgactccctcagcctctcctggacagtccccgagggccagtttgaccatttcttggtccagtttaagaatggggacgggcagcccaaggcggtgcgggtgccgggacacgaggatggggtcaccatctcgggcctggagccagaccacaagtacaagatgaacctgtacggcttccacggtggccagcgcgtgggccccgtgtctgctgttggtttaactgcctcgacagaacctcccacccctgaaccccccatcaagcctcgcctggaggagctgaccgtgacagatgcgacccctgactccctcagcctgtcctggacggttcccgagggacagtttgaccacttcctggtccagtacaagaatggggatgggcagcccaaggcaacacgggtgccaggacatgaggacagggtcaccatctccggcctggagccagacaacaagtacaagatgaacctgtacggcttccacggtggccagcgtgtgggccccgtgtctgccatcggggtgacagaggaagagacccccagccccacagaacccagcatggaggccccggagccccctgaggagccgctcctgggggagctaacagtgacaggatcctcccctgactcgctgagcctctcctggaccgtcccccagggccgcttcgactccttcaccgtgcagtacaaggacagggacgggcggccccaggtggtgcgtgttgggggcgaggagagcgaggtcaccgtggggggcctggagcctgggcgcaaatacaagatgcacctgtatggcctccacgaggggcggcgcgtgggcccggtgtccaccgtgggcgtgactgccccacaagaggatgtggacgagacccccagccctacagaaccaggcacagaggccccagggccccccgaggagcctctcctgggggagctgacagtgacaggatcctcccctgactcgctgagcctttcctggaccgtcccccagggccgctttgactccttcaccgtgcagtacaaggacagggacgggcggccccaggcggtgcgtgttgggggccaggagagcaaggtcactgtgaggggcctggagcctgggcgcaagtacaagatgcacctgtacggcctccacgaggggcggcgcctgggcccggtgtctgccgtgggcgtcacagaggatgaagccgagaccacccaagcagtgcctaccatgacccctgagccccccatcaagcctcgcctgggggagctgaccatgacagatgccacccctgactccctcagcctgtcctggacggttcccgagggccagtttgaccacttcctggtccagtacaggaatggggatgggcagcccaaggcggtgcgggtgccggggcacgaggacggggtcaccatctcaggcctggagccagaccataaatacaagatgaacctgtacggcttccacggtggccagcgcgtgggccccatctctgtcattggggtgacggaggaagagacccccagccccacggaactcagcactgaggccccggagccccctgaggagccgctcctgggggagctgacagtgacaggatcctcccctgactcgctgagcctctcctggaccatcccccagggccacttcgactccttcaccgtgcagtacaaggacagggacgggcggccccaggtgatgcgtgtcaggggcgaggagagcgaggtcaccgtggggggcctggagcccgggcgcaaatacaagatgcacctgtacggcctccacgaggggcggcgtgtgggcccggtgtccaccgtgggtgtgacagtgcccaccacaacccctgagccccccaacaagcctcgcctcggggagctgaccgtgacagatgccacccctgactccctcagcctgtcctggatggtccccgagggccagtttgaccacttcctggtccagtacaggaatggggatgggcagcccaaggtggtgcgggtgccggggcacgaggacggggtcaccatctcaggcctggagccagaccacaagtacaagatgaacctgtacggcttccacggtggccagcgcgtgggccccatctctgtcattggggtgacagaggaagaaactcccgcccccacagaacccagcacggaggccccggagccccctgaggagccgctcctgggggagctgacagtgacaggatcctcccctgactcgctgagcctctcctggaccatcccccagggccgcttcgactccttcactgtgcagtacaaggacagggacgggcggccccaggtggtgcgtgtcaggggcgaggagagcgaggtcaccgtggggggcctggagcccgggtgcaaatacaagatgcacctgtacggcctccacgaggggcagcgcgtgggcccagtgtccgctgtgggtgtgacagctccaaaggatgaagccgagaccacccaagcagtgcctaccatgacccctgagccccccatcaagcctcgcctgggggagctgaccgtgacagatgccacccccgactccctcagcctgtcctggatggttcccgagggccagtttgaccacttcctggtccagtacaggaatggggatgggcagcccaaggcggtgcgggtgccggggcacgaggacggggtcaccatctcaggcctggagccagaccataaatacaagatgaacctgtacggcttccacggtggccagcgcgtaggccctgtgtctgccattggggtgacggaggaagagacccccagccccacagaacccagcactgaggccccggaggcccctgaggagccgctcctgggggagttgacagtgacaggatcctcccctgactcgctgagcctctcctggaccgtcccccagggccgcttcgactccttcaccgtgcagtacaaggacagggacgggcagccccaggtggtgcgtgtcaggggcgaggagagcgaggtcaccgtggggggcctggagcccgggcgcaaatacaagatgcatctgtacggcctccacgaggggcagcgcgtgggcccagtgtccaccgtgggcatcacggcgcccctgcccacaccactgccggtggagccccgcctgggggagctggcggtggcggccgtgacctcggactcagtgggcctctcatggacggtggcccagggcccctttgactccttcctggtacagtacagggacgcgcaggggcagccccaggcagtgcctgtgagcggagacctccgagcggtcgccgtctcggggctggacccggcccgcaagtacaagttcctgctctttggactccagaatgggaaacgccacggcccagtccctgtggaggccaggaccgccccagacaccaaaccgtctccccgcctgggggagctgactgtgacagatgcgacccctgactccgtgggcctctcgtggacggtccctgagggcgaattcgactccttcgtggtccagtacaaggataaggatggtcggctccaggtggtgccggtggcagccaaccagcgggaggtcacagtccagggcctggagcccagtaggaaatacaggttcctgctctatggtctgtcaggcaggaaacgactgggccccatctctgctgacagcaccacagctcccctggagaaggagctacctccccacctgggggaactgaccgtggctgaggagacctccagctctctgcgcctgtcctggacggtagcccagggcccctttgactccttcgtggtccagtacagggacacggacgggcagcccagggcagtgcctgtggccgcagaccagcgcacagtcaccgtagaggacctggagcctggcaagaaatacaagtttctgctctacgggctccttgggggaaagcgcctgggcccggtctctgccctgggaatgacagccccagaagaggacacaccagccccagagttagccccagaggcccctgagcctcctgaagagccccgcctaggagtgctgaccgtgaccgacacaaccccagactccatgcgcctctcgtggagcgtggcccagggcccctttgattccttcgtggtccagtatgaggacacgaacgggcagccccaggccttgctcgtggacggcgaccagagcaagatcctcatctcaggcctggagcccagcaccccctacaggttcctcctctatggcctccatgaagggaagcgcctggggcccctctcagctgagggcaccacagggctggctcctgctggtcagacctcagaggagtcaaggccccgcctgtcccagctgtctgtgactgacgtgaccaccagttcactgaggctcaactgggaggccccaccgggggccttcgactccttcctgctccgctttggggttccatcaccaagcactctggagccgcatccgcgtccactgctgcagcgcgagctgatggtgccggggacgcggcactcggccgtgctccgggacctgcgttccgggactctgtacagcctgacactgtatgggctgcgaggaccccacaaggccgacagcatccagggaaccgcccgcaccctcagcccagttctggagagcccccgtgacctccaattcagtgaaatcagggagacctcagccaaggtcaactggatgcccccaccatcccgggcggacagcttcaaagtctcctaccagctggcggacggaggggagcctcagagtgtgcaggtggatggccaggcccggacccagaaactccaggggctgatcccaggcgctcgctatgaggtgaccgtggtctcggtccgaggctttgaggagagtgagcctctcacaggcttcctcaccacggttcctgacggtcccacacagttgcgtgcactgaacttgaccgagggattcgccgtgctgcactggaagcccccccagaatcctgtggacacctatgacgtccaggtcacagcccctggggccccgcctctgcaggcggagaccccaggcagcgcggtggactaccccctgcatgaccttgtcctccacaccaactacaccgccacagtgcgtggcctgcggggccccaacctcacttccccagccagcatcaccttcaccacagggctagaggcccctcgggacttggaggccaaggaagtgaccccccgcaccgccctgctcacttggactgagcccccagtccggcccgcaggctacctgctcagcttccacacccctggtggacagaaccaggagatcctgctcccaggagggatcacatctcaccagctccttggcctctttccctccacctcctacaatgcacggctccaggccatgtggggccagagcctcctgccgcccgtgtccacctctttcaccacgggtgggctgcggatccccttccccagggactgcggggaggagatgcagaacggagccggtgcctccaggaccagcaccatcttcctcaacggcaaccgcgagcggcccctgaacgtgttttgcgacatggagactgatgggggcggctggctggtgttccagcgccgcatggatggacagacagacttctggagggactgggaggactatgcccatggttttgggaacatctctggagagttctggctgggcaatgaggccctgcacagcctgacacaggcaggtgactactccatgcgcgtggacctgcgggctggggacgaggctgtgttcgcccagtacgactccttccacgtagactcggctgcggagtactaccgcctccacttggagggctaccacggcaccgcaggggactccatgagctaccacagcggcagtgtcttctctgcccgtgatcgggaccccaacagcttgctcatctcctgcgctgtctcctaccgaggggcctggtggtacaggaactgccactacgccaacctcaacgggctctacgggagcacagtggaccatcagggagtgagctggtaccactggaagggcttcgagttctcggtgcccttcacggaaatgaagctgagaccaagaaactttcgctccccagcggggggaggctgagctgctgcccacctctctcgcaccccagtatgactgccgagcactgaggggtcgccccgagagaagagccagggtccttcaccacccagccgctggaggaagccttctctgccagcgatctcgcagcactgtgtttacaggggggaggggaggggttcgtacgggagcaataaaggagaaactgaggtacccgg

SEQ ID NO: 633 - DNA, 450 bp, Homo sapiens
  modified_base (199)..(199): a, c, t or g
  modified_base (344)..(344): a, c, t or g
  modified_base (392)..(392): a, c, t or g
tttgctgccaaaagcctttaatatgccctggtcccaggctgtgttcatgaaagcggacacagcagtgcttccagcttcatggttcccaggttcaggttcctcccagcggaggtgggagggcagccctcacacctggcacccctcgagtgccatactcctggaggaagtcgttgagctgggcacaggctgcccgctggcngtcgctccggcacaggcgttcagagggcatctcctcgatccagctattcgagtccagcaggtactgggggtgtccctcgaggtcataggtggccccatccagacccatgatcaaatattctttcccaggttccaagcgaaggggncaggaggctcgaaccaggaagttgcgcatctgattagcagcggccttnacatccttggtgaagtgcaggacttgggtgatcttgggtctcaaagaggcggaaagca

SEQ ID NO: 634 - DNA, 421 bp, Homo sapiens
  modified_base (148)..(148): a, c, t or g
  modified_base (272)..(272): a, c, t or g
  modified_base (298)..(298): a, c, t or g
  modified_base (310)..(310): a, c, t or g
  modified_base (346)..(346): a, c, t or g
  modified_base (414)..(414): a, c, t or g
gagaagctgacctccctctctgaccgttacgtgatcactttgagaccgaggggccccacgtcctgctgtattttgactcggtccccacctcccgggagtgcgtgggctttgaggctgtgcaggaagtgccggtggggctggtgcagcnggccagcgcaaccctgtacgactactacaaccccgagctcagatgttctgtgttttacggggcaccaagtaagagcagactcttggccaccttgtgttctgctgaagtctgccagtgtgctganggggaagtgccctcgccagcgtcgcncccctggaagcngggggtctgcaaggacgaaggactggctacaaggantgaagttttgcctgctactaccccccgtgttggagtaacggcttccaaggttaaagttctccgagaanacagcag

SEQ ID NO: 635 - DNA, 5426 bp, Homo sapiens
agaaggtagcagacagacagacggatctaacctctcttggatcctccagccatgaggctgctctgggggctgatctgggcatccagcttcttcaccttatctctgcagaagcccaggttgctcttgttctctccttctgtggttcatctgggggtccccctatcggtgggggtgcagctccaggatgtgccccgaggacaggtagtgaaaggatcagtgttcctgagaaacccatctcgtaataatgtcccctgctccccaaaggtggacttcacccttagctcagaaagagacttcgcactcctcagtctccaggtgcccttgaaagatgcgaagagctgtggcctccatcaactcctcagaggccctgaggtccagctggtggcccattcgccatggctaaaggactctctgtccagaacgacaaacatccagggtatcaacctgctcttctcctctcgccgggggcacctctttttgcagacggaccagcccatttacaaccctggccagcgggttcggtaccgggtctttgctctggatcagaagatgcgcccgagcactgacaccatcacagtcatggtggagaactctcacggcctccgcgtgcggaagaaggaggtgtacatgccctcgtccatcttccaggatgactttgtgatcccagacatctcagagccagggacctggaagatctcagcccgattctcagatggcctggaatccaacagcagcacccagtttgaggtgaagaaatatgtccttcccaactttgaggtgaagatcacccctggaaagccctacatcctgacggtgccaggccatcttgatgaaatgcagttagacatccaggccaggtacatctatgggaagccagtgcagggggtggcatatgtgcgctttgggctcctagatgaggatggtaagaagactttctttcgggggctggagagtcagaccaagctggtgaatggacagagccacatttccctctcaaaggcagagttccaggacgccctggagaagctgaatatgggcattactgacctccaggggctgcgcctctacgttgctgcagccatcattgagtctccaggtggggagatggaggaggcagagctcacatcctggtattttgtgtcatctcccttctccttggatcttagcaagaccaagcgacaccttgtgcctggggcccccttcctgctgcaggccttggtccgtgagatgtcaggctccccagcttctggcattcctgtcaaagtttctgccacggtgtcttctcctgggtctgttcctgaagtccaggacattcagcaaaacacagacgggagcggccaagtcagcattccaataattatccctcagaccatctcagagctgcagctctcagtatctgcaggctccccacatccagcgatagccaggctcactgtggcagccccaccttcaggaggccccgggtttctgtctattgagcggccggattctcgacctcctcgtgttggggacactctgaacctgaacttgcgagccgtgggcagtggggccaccttttctcattactactacatgatcctatcccgagggcagatcgtgttcatgaatcgagagcccaagaggaccctgacctcggtctcggtgtttgtggaccatcacctggcaccctccttctactttgtggccttctactaccatggagaccacccagtggccaactccctgcgagtggatgtccaggctggggcctgcgagggcaagctggagctcagcgtggacggtgccaagcagtaccggaacggggagtccgtgaagctccacttagaaaccgactccctagccctggtggcgctgggagccttggacacagctctgtatgctgcaggcagcaagtcccacaagcccctcaacatgggcaaggtctttgaagctatgaacagctatgacctcggctgtggtcctgggggtggggacagtgcccttcaggtgttccaggcagcgggcctggccttttctgatggagaccagtggaccttatccagaaagagactaagctgtcccaaggagaagacaacccggaaaaagagaaacgtgaacttccaaaaggcgattaatgagaaattgggtcagtatgcttccccgacagccaagcgctgctgccaggatggggtgacacgtctgcccatgatgcgttcctgcgagcagcgggcagcccgcgtgcagcagccggactgccgggagcccttcctgtcctgctgccaatttgctgagagtctgcgcaagaagagcagggacaagggccaggcgggcctccaacgagccctggagatcctgcaggaggaggacctgattgatgaggatgacattcccgtgcgcagcttcttcccagagaactggctctggagagtggaaacagtggaccgctttcaaatattgacactgtggctccccgactctctgaccacgtgggagatccatggcctgagcctgtccaaaaccaaaggcctatgtgtggccaccccagtccagctccgggtgttccgcgagttccacctgcacctccgcctgcccatgtctgtccgccgctttgagcagctggagctgcggcctgtcctctataactacctggataaaaacctgactgtgagcgtccacgtgtccccagtggaggggctgtgcctggctgggggcggagggctggcccagcaggtgctggtgcctgcgggctctgcccggcctgttgccttctctgtggtgcccacggcagccaccgctgtgtctctgaaggtggtggctcgagggtccttcgaattccctgtgggagatgcggtgtccaaggttctgcagattgagaaggaaggggccatccatagagaggagctggtctatgaactcaaccccttggaccaccgaggccggaccttggaaatacctggcaactctgatcccaatatgatccctgatggggactttaacagctacgtcagggttacagcctcagatccattggacactttaggctctgagggggccttgtcaccaggaggcgtggcctccctcttgaggcttcctcgaggctgtggggagcaaaccatgatctacttggctccgacactggctgcttcccgctacctggacaagacagagcagtggagcacactgcctcccgagaccaaggaccacgccgtggatctgatccagaaaggctacatgcggatccagcagtttcggaaggcggatggttcctatgcggcttggttgtcacggggcagcagcacctggctcacagcctttgtgttgaaggtcctgagtttggcccaggagcaggtaggaggctcgcctgagaaactgcaggagacatctaactggcttctgtcccagcagcaggctgacggctcgttccaggacctctctccagtgatacataggagcatgcaggggggtttggtgggcaatgatgagactgtggcactcacagcctttgtgaccatcgcccttcatcatgggctggccgtcttccaggatgagggtgcagagccattgaagcagagagtggaagcctccatctcaaaggcaagctcatttttgggggagaaagcaagtgctgggctcctgggtgcccacgcagctgccatcacggcctatgccctgacactgaccaaggcccctgcggacctgcggggtgttgcccacaacaacctcatggcaatggcccaggagactggagataacctgtactggggctcagtcactggttctcagagcaatgccgtgtcgcccaccccggctcctcgcaacccatccgaccccatgccccaggccccagccctgtggattgaaaccacagcctacgccctgctgcacctcctgcttcacgagggcaaagcagagatggcagaccaggctgcggcctggctcacccgtcagggcagcttccaagggggattccgcagtacccaagacacggtgattgccctggatgccctgtctgcctactggattgcctcccacaccactgaggagaggggtctcaatgtgactctcagctccacaggccggaatgggttcaagtcccacgcgctgcagctgaacaaccgccagattcgcggcctggaggaggagctgcagttttccttgggcagcaagatcaatgtgaaggtgggaggaaacagcaaaggaaccctgaaggtccttcgtacctacaatgtcctggacatgaagaacacgacctgccaggacctacagatagaagtgacagtcaaaggccacgtcgagtacacgatggaagcaaacgaggactatgaggactatgagtacgatgagcttccagccaaggatgacccagatgcccctctgcagcccgtgacacccctgcagctgtttgagggtcggaggaaccgccgcaggagggaggcgcccaaggtggtggaggagcaggagtccagggtgcactacaccgtgtgcatctggcggaacggcaaggtggggctgtctggcatggccatcgcggacgtcaccctcctgagtggattccacgccctgcgtgctgacctggagaagctgacctccctctctgaccgttacgtgagtcactttgagaccgaggggccccacgtcctgctgtattttgactcggtccccacctcccgggagtgcgtgggctttgaggctgtgcaggaagtgccggtggggctggtgcagccggccagcgcaaccctgtacgactactacaaccccgagcgcagatgttctgtgttttacggggcaccaagtaagagcagactcttggccaccttgtgttctgctgaagtctgccagtgtgctgaggggaagtgccctcgccagcgtcgcgccctggagcggggtctgcaggacgaggatggctacaggatgaagtttgcctgctactacccccgtgtggagtacggcttccaggttaaggttctccgagaagacagcagagctgctttccgcctctttgagaccaagatcacccaagtcctgcacttcaccaaggatgtcaaggccgctgctaatcagatgcgcaacttcctggttcgagcctcctgccgccttcgcttggaacctgggaaagaatatttgatcatgggtctggatggggccacctatgacctcgagggacacccccagtacctgctggactcgaatagctggatcgaggagatgccctctgaacgcctgtgccggagcacccgccagcgggcagcctgtgcccagctcaacgacttcctccaggagtatggcactcaggggtgccaggtgtgagggctgccctcccacctccgctgggaggaacctgaacctgggaaccatgaagctggaagcactgctgtgtccgctttcatgaacacagcctgggaccagggcatattaaaggcttttggcagcaaagtgtcagtgttggc

SEQ ID NO: 636 - DNA, 429 bp, Homo sapiens
  modified_base (159)..(159): a, c, t or g
  modified_base (182)..(182): a, c, t or g
  modified_base (186)..(186): a, c, t or g
  modified_base (191)..(191): a, c, t or g
  modified_base (226)..(226): a, c, t or g
ctccagggagttttatttcctcagcagctgtttctcccatgcctgggcttgtgctaatgtggggcctgggcggactggcggtcgggtgggcatctccctcagactgggcaacctcaggtgccccagccgagttcctgcagcccgctttggccccaggcngtcctggagagggtctggctgtnttcnttgcntgctggtgacgtgatagcagcccctgcctcatggnctgcatgtgggccggctgggctgtgctgaggcaggttctagaacagtgatctgatagcatccaaggcagaccatgtgggtgagactttgggcccgggggaggcctcatcctcttctactcccccggcctgcaactcctctcagttgatgctgggccactcagtgcaagaggcaatggtgtctaatcaggaagacagtggtgta

SEQ ID NO: 637 - DNA, 458 bp, Homo sapiens
  modified_base (52)..(52): a, c, t or g
  modified_base (270)..(270): a, c, t or g
  modified_base (272)..(272): a, c, t or g
  modified_base (278)..(278): a, c, t or g
  modified_base (281)..(282): a, c, t or g
  modified_base (320)..(320): a, c, t or g
aactatggctcagctgacaacccccagaccatctggtttgagctgccacagnccaggagctgctatacaccactgtcttcctgatagacagcagtgcctcttgcactgagtggcccagcatcaactgagaggagtgcaggccggggagagaagaggatgaggcctcccccggcccaagtctcacccacatggtctgccttggatgctatcagatcactgttctagaacctgcctcagcacagcccagccggcccacatgcaggccatgangnattggnctnntatcacagtcaccagcaggcaaagaaaacagccagacnctctccaggacggcctggggcaaaagcgggctgcaggaactcggctggggcacctgaggttgcccagtctgagggagatgcccacccgaccccaggctccgccaggccccacattagcacaagcccaggcatgggaga

SEQ ID NO: 638 - DNA, 428 bp, Homo sapiens
  modified_base (115)..(115): a, c, t or g
ggagttcattcaaaatttattgagctgcaactgtgtgctcagcaatgagaatatagcagtgagcaagatgtgaacaagatctctgccctcgtgagcttacaatctagcagcgcancagcctattacagccataattttacaattgtaataaaaactcttggaaaatgcatggtgctaactgatttatcagaaagtcttgacccaccaagaaatcagaaaagacctccctgaggaaggaacatttaggatcagctaggtggaaagtgaaaggaagagtgttgcaggcagagaggacagtgtgtgagggtctgaggcaagacatgtaatgaactgaaagccagtgtgtctaggccatagagaacaaagaggggtgttgcgagatgagcctgatttatacaagatctttgaatttaggactttattcccaa

SEQ ID NO: 639 - DNA, 427 bp, Homo sapiens
ccaagttaccatcacctcttgtctaaactgctacggaaacttcctaacctgttctcccatttccacttctgacttccatgctgcaatgagagtcagctatgaaaaacaaacctaaacatcgaactttccttagcttcttcagtggcttccaactgcttttggaataaagtcctaaattcaaagatcttgtataaatcaggctcatctcgcaacacccctctttgttctctatggcctagacacactggctttcagttcattacatgtcttgcctcagaccctcacacactgtcctctctgcctgcaacactcttcctttcactttccacctagctgatcctaaatgttccttcctcagggaggtcttttctgatttcttggtgggtcaagactttctggataaatcagttagcaccatgcattttcc

SEQ ID NO: 640 - DNA, 3511 bp, Homo sapiens
aaaaaggacaatggtttccatgtcagcggataaacgctctcccctcggctcccggacgcgacggaggtcgtagtagtagtgagtacgtgctgaggagcaaaggagtaaccaagagatccagtgaccgacagagcaagagccatgccgcgccggggcctggtggctgggccagacttggagtattttcagcgtcgctatttcacgccggcggaggtggcccaacataacaggcccgaagacctctgggtatcttacctgggacgcgtgtacgacctaacgtcattggcacaggaatacaaggggaacctgctgctgaaacccatcgtggaagttgcaggccaggatatcagccactggtttgatccaaagaccagagacatccgcaagcacatagatccgctgaccggctgcctgaggtactgcaccccgcggggccgctttgtgcacgttccgcctcagctgccctgttcggactgggccaacgattttgggaagccctggtggcaggggtcgtattatgaggtggggcggctgtctgccaagacccggagcatccgcatcattaacacgctcacgtcgcaggagcacacactggaggtgggggttctggagtccatatgggaaatcctacaccgctatctcccctataactcacatgctgccagctacacgtggaaatatgaagggaagaacctgaacatggattttaccctggaagagaatgggatccgggatgaggaggaagaatttgactatctcagtatggacggtacacttcacacacctgcaatacttctgtacttcaatgatgatctcacggagttgtaggcaaggagatgtacactcgtgtagactcaagacgtatttcgagtttggctttttctgtgccttgaggaaaagtggtggggccgaggggtgcctggactcagatctccactcctctccaggagctagcctgtgcccttctgaagtgtaaaggccctattccctgccttcattacagtttgctctgagaaaattagtgaattaatctttgggaatgatacaagaagatcaagtaccttggtttagggagatgtagaagaggatagtcagagttcaggcagaactgtttgatagttaagagagagtagttctacaggggtgagggatggaaggacttttttggcaatgatggaaatgagatgtctgcaggaagatgggatttacaaagaaataggaaatgtttatcattgaccatacaaagctggcttatcttacttgtagaagagtgtttggcagctgaaacccaagggaaagaaaggaagtgcgtcattataggcaattcaggctagatattatactaggtacttcatataccctctttttttttttttgcccccaaaagagaaggggtcttgctctgtcacccagtctggagtgcagtggcaaaatcatggctcactgcagcctggagctcctgggcacaagtgatcctcccatctctgccttgagtagctgggacttcaggtgcacgccacaatgcctaattttttaattttttgtagacacagggtctcgctgtgttgcccaggctggtttcaacctcctggcctcaagtgatcctcttgcctcagcctcccaaatagcctcttcaagacaactaccccataaggtggattaccattactatgttacagataagtccttcgaaactttggaaagtttaatagctcaaagccacactaggtagtaaccactagagccagaatgcaaattcaagtctgcccaactccaaagtccatgttctctcaatataaagggaccatctcaatgtctaatctcatgttaacatttgtagccactgctctcagcaagtatttgggatgtggctttgtcctaggatccctgcacaataggaaattgtggtcctattgtatagtttgcagttattgtctctggaagggagtttgcagagttctcctgtggcgaagaggaggcaaggaaggctaagtgtcagttaagcaatagctattggggctacttctttgttaatcccataccccagatttctctcctgaccttttggggcaaagaggtgggtatttactaacttgaaggaaaactagagtggggaaaaggccggcaaattagtgacactttggcgagggagaaaaaggaggcagtttgccacttggagaagatgaggaagacagggttgcaagacggtgactccaaaagagggagctcgacaggggtaatgtaaacagagatgctaactaagtcagaaaactctcctggtgaccaaaagagaaccactattgggggtaatggctagatttggtctcctttaacttaaggaggggagatttgagaatgacagacagttgaacttcctggcagcagcaagcaaaaaacaaatcaggaagagtttagtgtgtcttctggcaggggacaccagggcccagcacaggagaaggtggcccctgtgagatactggtgggctatataggcgttttctgaggggctttgggaggcatgaacaaaggtggaaacattgctgttggcttcggcagtatctgaatttactgtgagatggagggtttaaatctaaccccatggaatgcaggagtccatgaattatctaaatcgatcattttgatctttaatcaactctgcaattatgtgtaccttgtttgctcaattaaaccctgaactatttgagaatgaaagctatgctgttcctctagtgcaagcctcagggcctgtcctgtgcctacaggatgtccccattctgccaaaacctgtccctcttccagagactcctacttcaatgtctcttgctagaaacacatccctttcctcacacatccagtcactcatcaagtgtaatctgtctcctaaatatctctggaacctatcttcttttctccaagttaccatcacctcttgtctaaactgctacggaaacttcctaacctgttctcccatttccacttctgacttccatgctgcaatgagagtcagctatgaaaaacaaacctaaacatcgaactttccttagcttcttcagtggcttccaactgcttttggaataaagtcctaaattcaaagatcttgtataaatcaggctcatctcgcaacacccctctttgttctctatggcctagacacactggctttcagttcattacatgtcttgcctcagaccctcacacactgtcctctctgcctgcaacactcttcctttcactttccacctagctgatcctaaatgttccttcctcagggaggtcttttctgatttcttggtgggtcaagactttctgataaatcagttagcaccatgcattttccagagtttttattacaattgtaaaattatggctgtaataggctggctgcgctgctagattgtaagctcacgagggcagagatcttgttcacatcttgctcactgctatattctcattgctgagcacacagttgcagctcaataaattttgaatgaactccaaaaaaaaaaaaaaaa

SEQ ID NO: 641 - DNA, 468 bp, Homo sapiens
gacgggctaaggtttatttacttacttaacatttaaaaataattcatttgcttcaacaacatggcagacaatcaagagtactattgaaacataattcagagagggtcaggacaggaaagatcacaacctcattcctgaggtggaatgaaagatctaagccaggcctccatcctaggccaggctcctccattaagcagagacaaccaaaagataagaaagccttggctcatccccatcaggagatagcctgaactgctcacaaataagaaacaacttgaccagactgaggactggttcctgatgagtcaataggaaagtcagttgggttctctcttcagtaggtgacttagcacccttctggagaacatagagtagtagtctggacctgggaggctaaggccacatccaacaaaggttaccttcttttcagtaacgctttgttccttttttccctcgtggccgaattct

SEQ ID NO: 642 - DNA, 470 bp, Homo sapiens
cgaaaaaaggaacaaagcgttactgaaaagaaggtaacctttgttggatgtgggccttagctccaggtccagactactactctatgttctccagaagggtgctaagtcacctactgaagagagaaccaactgactttcctattgactcatcaggaaccagtcctcagtctggtcaagttgtttcttatttgtgagcagttcaggctatctcctgatggggatgaggccaaggctttcttatcttttggttgtctctgcttaatggaggagcctggcctaggatggaggcctggcttagatctttcattccacctcaggaatgaggttgtgatctttcctgtcctgaccctctctgaattatgtttcaatagtactcttgattgtctgccatgttgttgaagcaaatgaattatttttaaatgttaagtaagtaaataaaccttagcccgtcaaaaaaaaaaaaaaaaaaa

SEQ ID NO: 643 - DNA, 4348 bp, Homo sapiens
gggaggcccagggagaacggggaagggacatttagtttgagacggtgctgagataggatcatgaaggaagaggtgaagggaattcctgtaagagtggcgctgcgttgtcgccctctggtccccaaagagattagcgagggctgccagatgtgcctttccttcgtgcccggagagcctcaggtggtggttggtacagataaatccttcacctacgattttgtatttgatccctctactgaacaggaagaagtcttcaatacagcagtagcgccactcataaaaggtgtatttaaaggatataatgcaacggtcctggcctatgggcagactggctctggaaaaacctattcaatgggaggtgcatatactgcagagcaagagaatgaaccaacagttggggttattcctagggtaatacaactgctcttcaaagaaattgataaaaagagtgactttgaatttactctgaaagtgtcttacttagagatttacaatgaagaaattttggatcttctatgtccatctcgtgagaaagctcaaataaatatacgagaggatcctaaggaaggcataaagattgtgggactcactgagaagactgttttggttgccttggatactgtttcctgtttggaacagggcaacaactctaggactgtggcctccacggctatgaactcccagtcgtcccgatctcatgccatctttacaatctccttagagcaaggaaagaaaagtgacaagaatagcagctttcgctccaagctgcatcttgtagacctcgctggatcagaaagacagaagaaaaccaaggctgaaggggatcgtctaaaagagggtattaatattaaccgaggcctcctatgcttgggaaatgtaatcagtgctcttggagatgacaaaaagggtggctttgcgccctacagagattccaagttgactcgactgcttcaagattctctaggaggtaatagccatactcttatgatagcctgtgtgagtcctgctgactccaatctagaggaaacattaaatacccttcgctatgctgacagagcaagaaaaatcaagaacaaacctattgttaatattgatccccagacagctgaacttaatcatctaaagcaacaggtacaacagctacaagtcttgttgctacaggcccatggaggtaccctgcctggatctataactgtggaaccatcagagaatctacaatccctgatggagaagaatcagtccctggtagaggagaatgaaaaattaagtcgtggtctgagcgaggcagctggtcagacagcccagatgttggagaggatcatttggacagagcaagcgaatgaaaaaatgaacgccaagctagaagagctcaggcagcatgcggcctgcaaactggatcttcaaaagctagtggagactttggaagaccaggaattgaaagaaaatgtagagataatttgtaacctgcagcaattgattacccagttatcggatgaaactgttgcttgcatggctgcagccattgatactgcggtggagcaagaagcccaagtagaaaccagtccagagacgagcaggtcttctgacgcttttaccactcagcatgctctccgtcaagcgcagatgtctaaggagctggttgagttgaataaagcgcttgcactgaaagaggccctggctaggaagatgactcagaatgacagccaactgcagcctattcagtaccaataccaggataacataaaagagccagaattagaagtcatcaatctgcaaaaggaaaaggaagaattggttcttgaacttcagacagcaaagaaggatgccaaccaagccaagttgagtgagcgccgccgcaaacgtctccaggagctggagggtcaaattgctgatctgaagaagaaactgaatgagcagtccaaacttctgaaactaaaggaatccacagagcgtactgtctccaaactgaaccaggagatacggatgatgaaaaaccagcgggtacagttaatgcgtcaaatgaaagaagatgctgagaagtttagacagtggaagcagaaaagagacaaagaagtaatacagttaaaagaacgagaccgtaagaggcaatatgagctgctgaaacttgaaagaaacttccagaaacaatccaatgtgctcagacgtaaaacggaggaggcagcagctgccaacaagcgtctcaaggatgctctccagaaacaacgggaggttgcagataagcggaaagagactcagagccgtggaatggaaggcactgcagctcgagtgaagaattggcttggaaacgaaattgaggttatggtcagtactgaggaagccaaacgccatctgaatgacctccttgaagatagaaagatcctggctcaagatgtggctcaactcaaagaaaaaaaggaatctggggagaatccacctcctaaactccggaggcgtacattctcccttactgaagtgcgtggtcaagtttcggagtcagaagattctattacaaagcagattgaaagcctagagactgaaatggaattcaggagtgctcagattgctgacctacagcagaagctgctggatgcagaaagtgaagacagaccaaaacaacgctgggagaatattgccaccattctggaagccaagtgtgccctgaaatatttgattggagagctggtctcctccaaaatacaggtcagcaaacttgaaagcagcctgaaacagagcaagaccagctgtgctgacatgcagaagatgctgtttgaggaacgaaatcattttgccgagatagagacagagttacaagctgagctggtcagaatggagcaacagcaccaagagaaggtgctgtaccttctcagccagctgcagcaaagccaaatggcagagaagcagttagaggaatcagtcagtgaaaaggaacagcagctgctgagcacactgaagtgtcaggatgaagaacttgagaaaatgcgagaagtgtgtgagcaaaatcagcagcttctccgagagaatgaaatcatcaagcagaaactgaccctcctccaggtagccagcagacagaaacatcttcctaaggatacccttctatctccagactcttcttttgaatatgtccagcctaagccaaaaccttctcgtgttaaagaaaagttcctggagcaaagcatggacatcgaggatctaaaatattgttcagagcattctgtgaatgagcatgaggatggtgatggtgatgatgatgagggggatgacgaggaatggaagccaacaaaattagttaatgtgtccaggaagaacatccaagggtgttcctgcaagggctggtgtggaaacaagcaatgtgggtgcaggaagcaaaagtcagactgtggtgtggactgttgctgtgaccccacaaagtgtcggaaccgccagcaaggcaaggatagcttgggcactgttgaacggacccaggattcagaaagctccttcaaactggaggatcctaccgaggtgaccccaggattgagcttctttaatcccgtctgtgccacccccaatagcaagatcctgaaagagatgtgcgatgtggagcaggtgctgtcaaagaagactcccccagctccctccccttttgacctcccagagttgaaacatgtagcaacagaataccaagaaaacaaggctccagggaagaaaaagaaacgggctctggccagcaacaccagcttcttctctggctgctcccctatcgaagaagaggcccactgaagttggagtcatcatctctacccccagtctggcttgggagatgctttcaggttgcagccagaaggggttttttaaatgacttctctggatttcaggtttcttgctgttgaaaaaaggaacaaagcgttactgaaaagaaggtaacctttgttggatgtgggccttagcctccaggtccagactactactctatgttctccagaagggtgctaagtcacctactgaagagagaaccaactgactttcctattgactcatcaggaaccagtcctcagtctggtcaagttgtttcttatttgtgagcagttcaggctatctcctgatggggatgaggccaaggctttcttatcttttggttgtctctgcttaatggaggagcctggcctaggatggaggcctggcttagatctttcattccacctcaggaatgaggttgtgatctttcctgtcctgaccctctctgaattatgtttcaatagtactcttgattgtctgccatgttgttgaagcaaatgaattatttttaaatgttaagtaagtaaataaaccttagcccgtctttttttttttttttttttttttttttttt

SEQ ID NO: 644 - DNA, 474 bp, Homo sapiens
  modified_base (320)..(320): a, c, t or g
  modified_base (372)..(372): a, c, t or g
  modified_base (412)..(412): a, c, t or g
atgggaataaatacttgttaaacttctcttataaatatgcattagaatgtccgataacacaagccaagggtgttaaaattaaggttaaatcaagactgaatttcccgcacggaccagcaggaaagccagttacctaaaagagcctaatccccaaatccgctcgaaggtgcagggcggcctcagtcccggggcatcttgaactggtccttctccctgcgcacggcccgcatggtggtcaccgggtccgtctcacctgcgtgctgctgcacctgtcttctccctcactctcatgaaggggttgtaggtaaactcctctgccnagggtggatggcactgtgggctccccgatgctgtacttctcctttggcccangccaacttctccccggatggcgggcattgcggggctccangtgggcgttgcaaactttgaggtttgtttgatggtgtactcgttggccacagtaaactcttg

SEQ ID NO: 645 - DNA, 494 bp, Homo sapiens
  modified_base (1)..(1): a, c, t or g
  modified_base (35)..(35): a, c, t or g
  modified_base (253)..(253): a, c, t or g
  modified_base (357)..(357): a, c, t or g
  modified_base (414)..(414): a, c, t or g
nttcggcacaggcaggacacatttgttacttcgtnagcaagcccggagctcggagccccctgccgtgttcacaggtgacaccttgtttgtggctggctgcgggaagttctatgaagggactgcggatgagatgtgtaaagctctgctggaggtcttgggccggctccccccggacacaagagtctactgtggccacgagtacaccatcaacaacctcaagtttgcacgccacgtggagcccggcaatgcgccnatccgggagaagctggcctgggcaaggagaagtacagcatcggggagcccacagtgccatccaccctggcagaggagtttacctacaaccccttcatgagagtnagggagaagacggtgcagcagacgcaggtgagacggacccggtgaccaccatgcggnccgtgcgcagggagaaggaccagttcaagatgccccgggacttgaggccgcccttgaactttcagcggatttggggatta

SEQ ID NO: 646 - DNA, 1519 bp, Homo sapiens
ctgcctcggaacgctgtcccccgcagcgacggcccgttccacctcgcgatctgccgggtacccgggcggcgtggcgctcggcctccagggatccactgtgcggtgccaaaaaagaggcggaggctcgcggcacagctctcccggcgcagctctcgggccgccgccgccgctcccaggcccgtctcccggcccgtggcagtcggggctcgcggacaaaacaagttgagcgcgagcgcgttgattggttggcggacggtgcgaggtggacgctgattggctgagggcagcgcgaggcgggcgctgattggctgcgacgcgccgacgccggtgttttgcagtcctgggcagctcggcagtccagcccggcccgggtcatggtggtgggccgagggctgctcggccgccgcagcctcgccgcgctgggagccgcctgcgcccgccgaggcctcggtccagccctgctgggagttttctgccacacagatttgcggaagaacctgaccgtggacgagggcaccatgaaggtagaggtgctgcctgccctgaccgacaactacatgtacctggtcattgatgatgagaccaaggaggctgccattgtggatccggtgcagccccagaaggtcgtggacgcggcgagaaagcacggggtgaaactgaccacagtgctcaccacccaccaccactgggaccatgctggcgggaatgagaaactggtcaagctggagtcgggactgaaggtgtacgggggtgacgaccgtatcggggccctgactcacaagatcactcacctgtccacactgcaggtggggtctctgaacgtcaagtgcctggcgaccccgtgccacacttcaggacacatttgttacttcgtgagcaagcccggaggctcggagccccctgccgtgttcacaggtgacaccttgtttgtggctggctgcgggaagttctatgaagggactgcggatgagatgtgtaaagctctgctggaggtcttgggccggctccccccggacacaagagtctactgtggccacgagtacaccatcaacaacctcaagtttgcacgccacgtggagcccggcaatgccgccatccgggagaagctggcctgggccaaggagaagtacagcatcggggagcccacagtgccatccaccctggcagaggagtttacctacaaccccttcatgagagtgagggagaagacggtgcagcagcacgcaggtgagacggacccggtgaccaccatgcgggccgtgcgcagggagaaggaccagttcaagatgccccgggactgaggccgccctgcaccttcagcggatttggggattaggctcttttaggtaactggctttcctgctggtccgtgcgggaaattcagtcttgatttaaccttaattttacagcccttggcttgtgttatcggacattctaatgcatatttataagagaagtttaacaagtatttattcccataaaaaaaaaaaaaaaaaaaaaaaaaaaaaaaaaaaaaaaa

SEQ ID NO: 647 - DNA, 439 bp, Homo sapiens
  modified_base (439)..(439): a, c, t or g
tttgcaaaatgctttattgttaatgccaacatagaattcaaaaagttagtcattggcacctgcaactgatactctactatttgcaaaaggcttcccttcttccactcccagccaggcccatcagattataactatatccacaaaatgatataatcaatcattaaatgggccatttccaccttgatatccagatgtttttcttaaaggatgaatggcacttgagtgtattgaaatcaaccatgaatgacagggcccaccccagcctttctatatgatttcaggagttcttgggtcacagcaagaatctgatccttcgtatacagagggaaactgaggtccagagagggaaagtgttgtcccaatgtcacacagcacgttaggactgaaacagtagccccatttcagactcccattccaacatttttcccatgcaggatgn

SEQ ID NO: 648 - DNA, 468 bp, Homo sapiens
  modified_base (52)..(52): a, c, t or g
  modified_base (301)..(301): a, c, t or g
gctgacgatccagagaggctggatgacttgctcaagttcaccagcatggtangtggcaaagagaggtccagagtcctggcccttgatgcccagctcagtgccacaaagctcaataggagggatgttccagtggatgagggccaccaggaagcacaggtccaaggctggtcccacacttatcagcagcaacaactgtcagttcatcctgcatgggaaaaatgttggaatgggagtctgaaatggggctactgtttcagtcctaacgtgctgtgtgacattgggacaacactttccctctctngacctcagtttccctctgtatacaaggatcagattcttgctgtgacccaagaactcctgaaatcatatagaaaggctggggtgggccctgtcattcatggttgatttcaatacactcaagtgccattcatcctttaagaaaaacatctggatatcaaggtggaaatg

SEQ ID NO: 649 - DNA, 2245 bp, Homo sapiens
ctcagctacgggacacatttcaggtatccaaggcagcagaggtgagtgggtcccccgagctctgtgaccttatgctccacactaactctggcagagcctccgtttcctcatagaacaaagaacagccaccatgcagctcttcctcctcttgtgcctggtgcttctcagccctcagggggcctcccttcaccgccaccacccccgggagatgaagaagagagtcgaggacctccatgtaggtgccacggtggcccccagcagcagaagggactttacctttgacctctacagggccttggcttccgctgcccccagccagaacatcttcttctcccctgtgagcatctccatgagcctggccatgctctccctgggggctgggtccagcacaaagatgcagatcctggagggcctgggcctcaacctccagaaaagctcagagaaggagctgcacagaggctttcagcagctccttcaggaactcaaccagcccagagatggcttccagctgagcctcggcaatgcccttttcaccgacctggtggtagacctgcaggacaccttcgtaagtgccatgaagacgctgtacctggcagacactttccccaccaactttagggactctgcaggggccatgaagcagatcaatgattatgtggcaaagcaaacgaagggcaagattgtggacttgcttaagaacctcgatagcaatgcggtcgtgatcatggtgaattacatcttctttaaagctaagtgggagacaagcttcaaccacaaaggcacccaagagcaagacttctacgtgacctcggagactgtggtgcgggtacccatgatgagccgcgaggatcagtatcactacctcctggaccggaacctctcctgcagggtggtgggggtcccctaccaaggcaatgccacggctttgttcattctccccagtgagggaaagatgcagcaggtggagaatggactgagtgagaaaacgctgaggaagtggcttaagatgttcaaaaagaggcagctcgagctttaccttcccaaattctccattgagggctcctatcagctggagaaagtcctccccagtctggggatcagtaacgtcttcacctcccatgctgatctgtccggcatcagcaaccactcaaatatccaggtgtctgagatggtgcacaaagctgtggtggaggtggacgagtcgggaaccagagcagcggcagccacggggacaatcttcactttcaggtcggcccgcctgaactctcagaggctagtgttcaacaggccctttctgatgttcattgtggataacaacatcctcttccttggcaaagtgaaccgcccctgaggtggggcttctcctgaaatctacaggcctcagggtgggagatgaagggggctatgctatggcccatctgtatgctggtagctagtgatttacacaggtttagttgactaatgaggcattacaaataatattactctatgatgattgcttccacccacacgactgcaacatacaggtgccttggggaaatgtggagaacattcaatcttgccgtcactattcatcaatgaagattagcactgagatccagagaggctggatgacttgctcaagttcaccagcatggtagtggcaaagagaggtccagagtcctggcccttgatgcccagctcagtgccacaaagctcagtaggagggatgttccagtggatgagggccaccaggaagcacaggtccaaggctggtcccacacttatcagcagcaacaactgtcagttcatcctgcatgggaaaaatgttggaatgggagtctgaaatggggctactgtttcagtcctaacgtgctgtgtgacattgggacaacactttccctctctggacctcagtttccctctgtatacaaggatcagattcttgctgtgacccaagaactcctgaaatcatatagaaaggctggggtgggccctgtcattcgtggttgatttcaatacactcaagtgccattcatcctttaagaaaaacatctggatatcaaggtggaaatggcccatttaatgattgattatatcattttgtggatatagttataatctgatgggcctggctgggagtggaagaagggaagccttttgcaaatagtagagtgtcagttgcaggtgccaatgactaactttttgaattctatgttggcattaacaataaagcattttgcaaacaaaaaaaaaaaaaaaaaaa

SEQ ID NO: 650 - DNA, 456 bp, Homo sapiens
gagtgttttaccattaacatttattgatgggatggataaatacagattgagaaacatacttgacagcaagatatcaaactgatagccagactataaaatgtatacatcctttttaaattaaaagaatttttttacaaagagcccttactataatggtcacttacctcctatcattcacataacagcagtagatatcccaggggtagcatccagagctgaggtgccccaaggaagacagaggcaatggcagaataatatgctgagaaaggactcttaagagcaatacaaagagaacagacaaaaatctcaccacaaaattgtacctgagtgacagattggtaaagtgttttacttttttttttcttttcgctctttggtctgacaagaaaagagttttaggtgtgtgaagtagggtgggaaaaaggtcagtttcaaattcagtaacatatggtaaca

SEQ ID NO: 651 - DNA, 209 bp, Homo sapiens
  modified_base (79)..(79): a, c, t or g
gcttcagttgaagctgaggaactaactgattagttgttgatcataatataattggttacaaagtggaagtgccagctgnttaagtacccaaagaaaagaatgcagcagcctaacttagtgttaccatatgttactgaatttgaaactgaccttttttcccaccctacttcacacacctaaaactcttttcttgtcagaccaaagagcga

SEQ ID NO: 652 - DNA, 541 bp, Homo sapiens
  modified_base (318)..(318): a, c, t or g
  modified_base (511)..(511): a, c, t or g
gggatatgacctttattgaacttatccaccagagtggaaataatgtctgtacaaaaccaaatgtttgttactataacttctgcatcacaattaaaatccaaacagttttttaaaaacagtcaactcaatcaaaacccactacttcagaatcaatagcttctttgaagccacagtaacacttaaatatggttaagactcgaatgcagaaatttggttggttggaaagctaattaaacttccaacttgctcaaatagaattacaaaaaggcaaaattgtgtttttcacagagatacagtccactggaatcaccaacactnggacagctgttagagtatttagagtcctgagataacaaggaatccaggcatcctttagacagtcttctgttgtcctttcttcccaatcagagatttgtggatgtgtggaatgacaccaccaccagcaattgtagccttggatgagagaatcccaattcttcatctccacgaatagcaagttgcaagtgacgangggtaatacgccttacctttaagtcctttg

SEQ ID NO: 653 - DNA, 615 bp, Homo sapiens
  modified_base (26)..(27): a, c, t or g
  modified_base (98)..(98): a, c, t or g
  modified_base (100)..(100): a, c, t or g
  modified_base (168)..(168): a, c, t or g
  modified_base (277)..(277): a, c, t or g
  modified_base (280)..(280): a, c, t or g
  modified_base (509)..(509): a, c, t or g
  modified_base (615)..(615): a, c, t or g
agttcggcacagcgatcgcggtgacnnaaggagtaggtggtgggatctcaccgtgggtccgattagccttttctctgccttgcttgcttgagcttcangnagattcgaaatggctggcggtaaggctggaaaggactccggaaaggccaagacaaaggcggtttcccntcgcagagagccggcttgcagttcccagtgggccgtattcatcgacacctaaaatctaggacgaccagtcatggacgtgtgggcgcgactgccgctgtgtacaggcacncantcctggagtacctcaccgcagaggtacttgaactggcaggaaatgcatcaaaagacttaaaggtaaagcgtattacccctccgtcacttgcaacttgctattcgtggagatgaagaattggattctctcatcaaggctacaattgctggtggtggtgtcattccacacatccacaaatctctgattgggaagaaaggacaacagaagactgtctaaaggatgcctggantccttgttatctcaggactctaaatactctaacagctgtccagtgttggtgattccagtggactgtatctctgtgaaaaacacaattttgcctttttggaattcan

SEQ ID NO: 654 - DNA, 951 bp, Homo sapiens
attggtgggatgagcaatccgagttcccggatgagggaacattctgcagtataaagggagcagggaaggcgggagacagcgcagtttgaatcgcggtgcgacgaaggagtaggtggtgggatctcaccgtgggtccgattagccttttctctgccttgcttgcttgagcttcagcggaattcgaaatggctggcggtaaggctggaaaggactccggaaaggccaagacaaaggcggtttcccgctcgcagagagccggcttgcagttcccagtgggccgtattcatcgacacctaaaatctaggacgaccagtcatggacgtgtgggcgcgactgccgctgtgtacagcgcagccatcctggagtacctcaccgcagaggtacttgaactggcaggaaatgcatcaaaagacttaaaggtaaagcgtattacccctcgtcacttgcaacttgctattcgtggagatgaagaattggattctctcatcaaggctacaattgctggtggtggtgtcattccacacatccacaaatctctgattgggaagaaaggacaacagaagactgtctaaaggatgcctggattccttgttatctcaggactctaaatactctaacagctgtccagtgttggtgattccagtggactgtatctctgtgaaaaacacaattttgcctttttgtaattctatttgagcaagttggaagtttaattagctttccaaccaaccaaatttctgcattcgagtcttaaccatatttaagtgttactgtggcttcaaagaagctattgattctgaagtagtgggttttgattgagttgactgtttttaaaaaactgtttggattttaattgtgatgcagaagttatagtaacaaacatttggttttgtacagacattatttccactctggtggataagttcaataaaggtcatatcccaaacaaaa

SEQ ID NO: 655 - DNA, 646 bp, Homo sapiens
  modified_base (539)..(539): a, c, t or g
  modified_base (567)..(567): a, c, t or g
  modified_base (619)..(619): a, c, t or g
  modified_base (628)..(628): a, c, t or g
tatctcacactgtactttatttttcttcacaatattaactagacagacaaggaaagtttaatggcaatgtgactttttccaacaacacaaacaaagtgccattatagctaatggtggccaactggagacttactttaccttaaccatgtaaagtatccttaccgtattttttatgtgtacagtgttgcagaatatcagccacctcttaaaagtatcaatcttaaaaagagccatggaaggtaaaagtatgaaaatcttgataacaaaagctttcaatacaaaaacacttattgtacacttatttttatttaaaacaaaaataaccccagtaactcaaaacaaaagcaaaccttggttgaaaacttaagaaggtataataaacaaaaccaccaaaagaaagcttccccaaaagaaatgcaatccactgtcactcttgcaaattctaccttggagggaaaaacttaatgaaatgagctatctggagggcccacggagattttccaaaaggtttaggtgcatggatttactcagtatctacntacagtcttatttattaatagctcaganttcctgattgagcgagcctttccatctccaccagtgtccccacttctgtgcncacttgggntgcagacaccctgtgttg

SEQ ID NO: 656 - DNA, 465 bp, Homo sapiens
ggtatttaaacaataaatgtgcagttttaactaacaggatatttaatgacaaccttctggttggtagggacatctgtttctaaatgtttattatgtacaatacagaaaaaaattttataaaattaagcaatgtgaaactgaattggagagtgataatacaagtcctttagtcttacccagtgaatcattctgttccatgtctttggacaaccatgaccttggacaatcatgaaatatgcatctcactggatgcaaagaaaatcagatggagcatgaatggtactgtaccggttcatctggactgccccagaaaaataacttcaagcaaacatcctatcaacaacaaggttgttctgcataccaagctgagcacagaagatgggaacactggtggaggatggaaaggctcgctcaatcaagaaaattctgagactattaataaataagactgtagtgtagatactg

SEQ ID NO: 657 - DNA, 6030 bp, Homo sapiens
gttggcccccgttacttttcctctgggaaatatggcgcacgctgggagaacagggtacgataaccgggagatagtgatgaagtacatccattataagctgtcgcagaggggctacgagtgggatgcgggagatgtgggcgccgcgcccccgggggccgcccccgcgccgggcatcttctcctcgcagcccgggcacacgccccatacagccgcatcccgggacccggtcgccaggacctcgccgctgcagaccccggctgcccccggcgccgccgcggggcctgcgctcagcccggtgccacctgtggtccacctgaccctccgccaggccggcgacgacttctcccgccgctaccgccgcgacttcgccgagatgtccaggcagctgcacctgacgcccttcaccgcgcggggacgctttgccacggtggtggaggagctcttcagggacggggtgaactgggggaggattgtggccttctttgagttcggtggggtcatgtgtgtggagagcgtcaaccgggagatgtcgcccctggtggacaacatcgccctgtggatgactgagtacctgaaccggcacctgcacacctggatccaggataacggaggctgggatgcctttgtggaactgtacggccccagcatgcggcctctgtttgatttctcctggctgtctctgaagactctgctcagtttggccctggtgggagcttgcatcaccctgggtgcctatctgggccacaagtgaagtcaacatgcctgccccaaacaaatatgcaaaaggttcactaaagcagtagaaataatatgcattgtcagtgatgttccatgaaacaaagctgcaggctgtttaagaaaaaataacacacatataaacatcacacacacagacagacacacacacacacaacaattaacagtcttcaggcaaaacgtcgaatcagctatttactgccaaagggaaatatcatttattttttacattattaagaaaaaaagatttatttatttaagacagtcccatcaaaactcctgtctttggaaatccgaccactaattgccaagcaccgcttcgtgtggctccacctggatgttctgtgcctgtaaacatagattcgctttccatgttgttggccggatcaccatctgaagagcagacggatggaaaaaggacctgatcattggggaagctggctttctggctgctggaggctggggagaaggtgttcattcacttgcatttctttgccctgggggctgtgatattaacagagggagggttcctgtggggggaagtccatgcctccctggcctgaagaagagactctttgcatatgactcacatgatgcatacctggtgggaggaaaagagttgggaacttcagatggacctagtacccactgagatttccacgccgaaggacagcgatgggaaaaatgcccttaaatcataggaaagtatttttttaagctaccaattgtgccgagaaaagcattttagcaatttatacaatatcatccagtaccttaagccctgattgtgtatattcatatattttggatacgcaccccccaactcccaatactggctctgtctgagtaagaaacagaatcctctggaacttgaggaagtgaacatttcggtgacttccgcatcaggaaggctagagttacccagagcatcaggccgccacaagtgcctgcttttaggagaccgaagtccgcagaacctgcctgtgtcccagcttggaggcctggtcctggaactgagccggggccctcactggcctcctccagggatgatcaacagggcagtgtggtctccgaatgtctggaagctgatggagctcagaattccactgtcaagaaagagcagtagaggggtgtggctgggcctgtcaccctggggccctccaggtaggcccgttttcacgtggagcatgggagccacgacccttcttaagacatgtatcactgtagagggaaggaacagaggccctgggcccttcctatcagaaggacatggtgaaggctgggaacgtgaggagaggcaatggccacggcccattttggctgtagcacatggcacgttggctgtgtggccttggcccacctgtgagtttaaagcaaggctttaaatgactttggagagggtcacaaatcctaaaagaagcattgaagtgaggtgtcatggattaattgacccctgtctatggaattacatgtaaaacattatcttgtcactgtagtttggttttatttgaaaacctgacaaaaaaaaagttccaggtgtggaatatgggggttatctgtacatcctggggcattaaaaaaaaaatcaatggtggggaactataaagaagtaacaaaagaagtgacatcttcagcaaataaactaggaaatttttttttcttccagtttagaatcagccttgaaacattgatggaataactctgtggcattattgcattatataccatttatctgtattaactttggaatgtactctgttcaatgtttaatgctgtggttgatatttcgaaagctgctttaaaaaaatacatgcatctcagcgtttttttgtttttaattgtatttagttatggcctatacactatttgtgagcaaaggtgatcgttttctgtttgagatttttatctcttgattcttcaaaagcattctgagaaggtgagataagccctgagtctcagctacctaagaaaaacctggatgtcactggccactgaggagctttgtttcaaccaagtcatgtgcatttccacgtcaacagaattgtttattgtgacagttatatctgttgtccctttgaccttgtttcttgaaggtttcctcgtccctgggcaattccgcatttaattcatggtattcaggattacatgcatgtttggttaaacccatgagattcattcagttaaaaatccagatggcaaatgaccagcagattcaaatctatggtggtttgacctttagagagttgctttacgtggcctgtttcaacacagacccacccagagccctcctgccctccttccgcgggggctttctcatggctgtccttcagggtcttcctgaaatgcagtggtgcttacgctccaccaagaaagcaggaaacctgtggtatgaagccagacctccccggcgggcctcagggaacagaatgatcagacctttgaatgattctaatttttaagcaaaatattattttatgaaaggtttacattgtcaaagtgatgaatatggaatatccaatcctgtgctgctatcctgccaaaatcattttaatggagtcagtttgcagtatgctccacgtggtaagatcctccaagctgctttagaagtaacaatgaagaacgtggacgcttttaatataaagcctgttttgtcttctgttgttgttcaaacgggattcacagagtatttgaaaaatgtatatatattaagaggtcacgggggctaattgctggctggctgccttttgctgtggggttttgttacctggttttaataacagtaaatgtgcccagcctcttggccccagaactgtacagtattgtggctgcacttgctctaagagtagttgatgttgcattttccttattgttaaaaacatgttagaagcaatgaatgtatataaaagcctcaactagtcatttttttctcctcttcttttttttcattatatctaattattttgcagttgggcaacagagaaccatccctattttgtattgaagagggattcacatctgcatcttaactgctctttatgaatgaaaaaacagtcctctgtatgtactcctctttacactggccagggtcagagttaaatagagtatatgcactttccaaattggggacaagggctctaaaaaaagccccaaaaggagaagaacatctgagaacctcctcggccctcccagtccctcgctgcacaaatactccgcaagagaggccagaatgacagctgacagggtctatggccatcgggtcgtctccgaagatttggcaggggcagaaaactctggcaggcttaagatttggaataaagtcacagaatcaaggaagcacctcaatttagttcaaacaagacgccaacattctctccacagctcacttacctctctgtgttcagatgtggccttccatttatatgtgatctttgttttattagtaaatgcttatcatctaaagatgtagctctggcccagtgggaaaaattaggaagtgattataaatcgagaggagttataataatcaagattaaatgtaaataatcagggcaatcccaacacatgtctagctttcacctccaggatctattgagtgaacagaattgcaaatagtctctatttgtaattgaacttatcctaaaacaaatagtttataaatgtgaacttaaactctaattaattccaactgtacttttaaggcagtggctgtttttagactttcttatcacttatagttagtaatgtacacctactctatcagagaaaaacaggaaaggctcgaaatacaagccattctaaggaaattagggagtcagttgaaattctattctgatcttattctgtggtgtcttttgcagcccagacaaatgtggttacacactttttaagaaatacaattctacattgtcaagcttatgaaggttccaatcagatctttattgttattcaatttggatctttcagggattttttttttaaattattatgggacaaaggacatttgttggaggggtgggagggaggaacaatttttaaatataaaacattcccaagtttggatcagggagttggaagttttcagaataaccagaactaagggtatgaaggacctgtattggggtcgatgtgatgcctctgcgaagaaccttgtgtgacaaatgagaaacattttgaagtttgtggtacgacctttagattccagagacatcagcatggctcaaagtgcagctccgtttggcagtgcaatggtataaatttcaagctggatatgtctaatgggtatttaaacaataaatgtgcagttttaactaacaggatatttaatgacaaccttctggttggtagggacatctgtttctaaatgtttattatgtacaatacagaaaaaaattttataaaattaagcaatgtgaaactgaattggagagtgataatacaagtcctttagtcttacccagtgaatcattctgttccatgtctttggacaaccatgaccttggacaatcatgaaatatgcatctcactggatgcaaagaaaatcagatggagcatgaatggtactgtaccggttcatctggactgccccagaaaaataacttcaagcaaacatcctatcaacaacaaggttgttctgcataccaagctgagcacagaagatgggaacactggtggaggatggaaaggctcgctcaatcaagaaaattctgagactattaataaataagactgtagtgtagatactgagtaaatccatgcacctaaaccttttggaaaatctgccgtgggccctccagatagctcatttcattaagtttttccctccaaggtagaatttgcaagagtgacagtggattgcatttcttttggggaagctttcttttggtggttttgtttattataccttcttaagttttcaaccaaggtttgcttttgttttgagttactggggttatttttgttttaaataaaaataagtgtacaataagtgtttttgtattgaaagcttttgttatcaagattttcatacttttaccttccatggctctttttaagattgatacttttaagaggtggctgatattctgcaacactgtacacataaaaaatacggtaaggatactttacatggttaaggtaaagtaagtctccagttggccaccattagctataatggcactttgtttgtgttgttggaaaaagtcacattgccattaaactttccttgtctgtctagttaatattgtgaagaaaaataaagtacagtgtgagatactg

SEQ ID NO: 658 - DNA, 427 bp, Homo sapiens
  modified_base (313)..(313): a, c, t or g
  modified_base (323)..(323): a, c, t or g
  modified_base (334)..(334): a, c, t or g
  modified_base (341)..(341): a, c, t or g
  modified_base (402)..(402): a, c, t or g
cattttgaaaaagctatttactttttttccaaatattatcccaaataggtgttttacagataagggtcaatacgaagtcaaacattctacagaagaaaatcgtttttacagacattaagaataattttaacagaagaaaaagctcacatctatctagatgtggctatgttccatgggaaaaatttcagcatccaaagtgcaaagaaaaaatgactgtagcttttcttaccacaaaatattgacaatcttcccttatagcctactctttattgttaagttgggatgccaaaggatggatatattgacctttagnaggttggggntccactggacnagggttnggggggtaatggggggccaagcatcaggatggaattccaatttttaaaaaaaaaaactggnttttgaccccccaattgaccccaag

SEQ ID NO: 659 - DNA, 472 bp, Homo sapiens
  modified_base (201)..(201): a, c, t or g
aagaaccagaagttctcattccccattatgaactgagctataatatggagctttcataaaaatgggatgcattgaggacagaactagtgatgggagtatgcgtactttcgatttggatgattaggtctttaatagtgttgagtggcacaaccttgtaaatgtgaaagtacaactccgtatttatctctgatgtgccgctgntgaactttgggttcatttggggtcaaagccagttttttttttaaaattgaattcattctgatgcttggcccccatacccccaaccttgtccagtggagcccaacttctaaaggtcaatatatcatcctttggcatcccaactaacaataaagagtaggctataagggaagattgtcaatattttgtggtaagaaaagctacagtcattttttctttgcactttggatgctgaaatttttcccatggaacatagccacatctagatagatgt

SEQ ID NO: 660 - DNA, 3237 bp, Homo sapiens
gcgaagtgaagggtggcccaggtggggccaggctgactgaatgtatctcctagctatggactaaataatacatggggggaaataaacaagtattcatgagggtgaaaatgtgacccagcaggaaaattacaactattttcaattgacgttgaataggatgagtcatggaatttaagtgatttactgaagattatactactggtagatagaagagctaaagaaagatggatactatgatgctgaatgtgcggaatctgtttgagcagcttgtgcgccgggtggagattctcagtgaaggaaatgaagtccaatttatccagttggcgaaggactttgaggatttccgtaaaaagtggcagaggactgaccatgagctggggaaatacaaggatcttttgatgaaagcagagactgagcgaagtgctctggatgttaagctgaagcatgcacgtaatcaggtggatgtagagatcaaacggagacagagagctgaggctgactgcgaaaagctggaacgacagattcagctgattcgagagatgctcatgtgtgacacatctggcagcattcaactaagcgaggagcaaaaatcagctctggcttttctcaacagaggccaaccatccagcagcaatgctgggaacaaaagactatcaaccattgatgaatctggttccattttatcagatatcagctttgacaagactgatgaatcactggattgggactcttctttggtgaagactttcaaactgaagaagagagaaaagaggcgctctactagccgacagtttgttgatggtccccctggacctgtaaagaaaactcgttccattggctctgcagtagaccaggggaatgaatccatagttgcaaaaactacagtgactgttcccaatgatggcgggcccatcgaagctgtgtccactattgagactgtgccatattggaccaggagccgaaggaaaacaggtactttacaaccttggaacagtgactccaccctgaacagcaggcagctggagccaagaactgagacagacagtgtgggcacgccacagagtaatggagggatgcgcctgcatgactttgtttctaagacggttattaaacctgaatcctgtgttccatgtggaaagcggataaaatttggcaaattatctctgaagtgtcgagactgtcgtgtggtctctcatccagaatgtcgggaccgctgtccccttccctgcattcctaccctgataggaacacctgtcaagattggagagggaatgctggcagactttgtgtcccagacttctccaatgatcccctccattgttgtgcattgtgtaaatgagattgagcaaagaggtctgactgagacaggcctgtataggatctctggctgtgaccgcacagtaaaagagctgaaagagaaattcctcagagtgaaaactgtacccctcctcagcaaagtggatgatatccatgctatctgtagccttctaaaagactttcttcgaaacctcaaagaacctcttctgacctttcgccttaacagagcctttatggaagcagcagaaatcacagatgaagacaacagcatagctgccatgtaccaagctgttggtgaactgccccaggccaacagggacacattagctttcctcatgattcacttgcagagagtggctcagagtccacatactaaaatggatgttgccaatctggctaaagtctttggccctacaatagtggcccatgctgtgcccaatccagacccagtgacaatgttacaggacatcaagcgtcaacccaaggtggttgagcgcctgctttccttgcctctggagtattggagtcagttcatgatggtggagcaagagaacattgaccccctacatgtcattgaaaactcaaatgccttttcaacaccacagacaccagatattaaagtgagtttactgggacctgtgaccactcctgaacatcagcttctcaagactccttcatctagttccctgtcacagagagtccgttccaccctcaccaagaacactcctagatttgggagcaaaagcaagtctgccactaacctaggacgacaaggcaacttttttgcttctccaatgctcaagtgaagtcacatctgcctgttacttcccagcattgactgactataagaaaggacacatctgtactctgctctgcagcctcctgtactcattactacttttagcattctccaggcttttactcaagtttaattgtgcatgagggttttattaaaactatatatatctccccttccttctcctcaagtcacataatatcagcactttgtgctggtcattgttgggagcttttagatgagacatctttccaggggtagaagggttagtatggaattggttgtgattctttttggggaagggggttattgttcctttggcttaaagccaaatgctgctcatagaatgatctttctctagtttcatttagaactgatttccgtgagacaatgacagaaaccctacctatctgataagattagcttgtctcagggtgggaagtgggagggcagggcaaagaaaggattagaccagaggatttaggatgcctccttctaagaaccagaagttctcattccccattatgaactgagctataatatggagctttcataaaaatgggatgcattgaggacagaactagtgatgggagtatgcgtagctttgatttggatgattaggtctttaatagtgttgagtggcacaaccttgtaaatgtgaaagtacaactcgtatttatctctgatgtgccgctggctgaactttgggttcatttggggtcaaagccagtttttcttttaaaattgaattcattctgatgcttggcccccatacccccaaccttgtccagtggagcccaacttctaaaggtcaatatatcatcctttggcatcccaactaacaataaagagtaggctataagggaagattgtcaatattttgtggtaagaaaagctacagtcattttttctttgcactttggatgctgaaatttttcccatggaacatagccacatctagatagatgtgagctttttcttctgttaaaattattcttaatgtctgtaaaaacgattttcttctgtagaatgtttgacttcgtattgacccttatctgtaaaacacctatttgggataatatttggaaaaaaagtaaatagctttttcaaaatgaaaaaaaaaa

SEQ ID NO: 661 - DNA, 373 bp, Homo sapiens
  modified_base (260)..(260): a, c, t or g
  modified_base (292)..(292): a, c, t or g
  modified_base (312)..(312): a, c, t or g
  modified_base (353)..(353): a, c, t or g
  modified_base (356)..(356): a, c, t or g
caggctctgagtatttatttcagttaatagtagtctcccagggaagactgggggaaatataggtgtttctgtcaactccaggaaaatcacagcatcatatgagagtactcagacctgctgcccactgaggagggggctattctcaccaatgggacaagagcagaagatgcggggtagacgcagccagtgactgctgctatgtggcaactggggtacggagaagtcttgcttcataagtctgcgcctatatatcagagatncaaggaccacagccatcaacaccagcaagatncccacgatcagcggaacctncccaaggcctgctttcttgaccaggcatgataagctgggtnctnaccactgccaggctgtt

SEQ ID NO: 662 - DNA, 447 bp, Homo sapiens
  modified_base (9)..(9): a, c, t or g
  modified_base (72)..(72): a, c, t or g
  modified_base (148)..(148): a, c, t or g
  modified_base (384)..(384): a, c, t or g
  modified_base (394)..(394): a, c, t or g
  modified_base (413)..(413): a, c, t or g
  modified_base (442)..(442): a, c, t or g
actgcagancctctggaaccacatctgtgcaggtgccaaccactgaagtcataagcactgcacctgtgagantgccaactgcagagagcacaggtatgacacctgagaaggtgccagtttcagaggtcatgggtaccacactggcagngatgtcaactccagaggctacaggtatgacacctgcagaggtatcaattgtggtgctttctggaaccacagctgcacaggtaacaactacagagtgggtggagaccacagctagagagctacctatccctgagcctgaaggtccagatgccagctcaatcatgtctacggaaagtattacaggttccctgggggccccctgcttggatgggtacagccaccttttaaggcttggtngaaagagacnagttccccccttggatttngtgttcctggtattcgatattggtttccnttttc

SEQ ID NO: 663 - DNA, 2143 bp, Homo sapiens
agtgcctttggttgctggagggaagaacacaatggatctggtgctaaaaagatgccttcttcatttggctgtgataggtgctttgctggctgtgggggctacaaaagtacccagaaaccaggactggcttggtgtctcaaggcaactcagaaccaaagcctggaacaggcagctgtatccagagtggacagaagcccagagacttgactgctggagaggtggtcaagtgtccctcaaggtcagtaatgatgggcctacactgattggtgcaaatgcctccttctctattgccttgaacttccctggaagccaaaaggtattgccagatgggcaggttatctgggtcaacaataccatcatcaatgggagccaggtgtggggaggacagccagtgtatccccaggaaactgacgatgcctgcatcttccctgatggtggaccttgcccatctggctcttggtctcagaagagaagctttgtttatgtctggaagacctggggccaatactggcaagttctagggggcccagtgtctgggctgagcattgggacaggcagggcaatgctgggcacacacaccatggaagtgactgtctaccatcgccggggatcccggagctatgtgcctcttgctcattccagctcagccttcaccattactgaccaggtgcctttctccgtgagcgtgtcccagttgcgggccttggatggagggaacaagcacttcctgagaaatcagcctctgacctttgccctccagctccatgaccccagtggctatctggctgaagctgacctctcctacacctgggactttggagacagtagtggaaccctgatctctcgggcacttgtggtcactcatacttacctggagcctggcccagtcactgcccaggtggtcctgcaggctgccattcctctcacctcctgtggctcctccccagttccaggcaccacagatgggcacaggccaactgcagaggcccctaacaccacagctggccaagtgcctactacagaagttgtgggtactacacctggtcaggcgccaactgcagagccctctggaaccacatctgtgcaggtgccaaccactgaagtcataagcactgcacctgtgcagatgccaactgcagagagcacaggtatgacacctgagaaggtgccagtttcagaggtcatgggtaccacactggcagagatgtcaactccagaggctacaggtatgacacctgcagaggtatcaattgtggtgctttctggaaccacagctgcacaggtaacaactacagagtgggtggagaccacagctagagagctacctatccctgagcctgaaggtccagatgccagctcaatcatgtctacggaaagtattacaggttccctgggccccctgctggatggtacagccaccttaaggctggtgaagagacaagtccccctggattgtgttctgtatcgatatggttccttttccgtcaccctggacattgtccagggtattgaaagtgccgagatcctgcaggctgtgccgtccggtgagggggatgcatttgagctgactgtgtcctgccaaggcgggctgcccaaggaagcctgcatggagatctcatcgccagggtgccagccccctgcccagcggctgtgccagcctgtgctacccagcccagcctgccagctggttctgcaccagatactgaagggtggctcggggacatactgcctcaatgtgtctctggctgataccaacagcctggcagtggtcagcacccagcttatcatgcctggtcaagaagcaggccttgggcaggttccgctgatcgtgggcatcttgctggtgttgatggctgtggtccttgcatctctgatatataggcgcagacttatgaagcaagacttctccgtaccccagttgccacatagcagcagtcactggctgcgtctaccccgcatcttctgctcttgtcccattggtgagaatagccccctcctcagtgggcagcaggtctgagtactctcatatgatgctgtgattttcctggagttgacagaaacacctatatttcccccagtcttccctgggagactactattaactgaaataaatactcagagcctgaaaaaaaaaaaaaaaaaa

SEQ ID NO: 664 - DNA, 437 bp, Homo sapiens
tcaaaataaatgtttaatataatttttagaccaaagaaaaactcaatcatacattgtctccagtggaccatatgtgccagaacaggaccaactcagtccagctttgaaggccctgattcagtcctactggtataatctcccttgatttattgatttcgtcgtatgcttcttatgcaatacaaggtgcattttactcttgaagtccctatcacctccaccatcagccatttaactgcaaaagcatgcttcctaatgggagggttttcttcccccttcccctgcagaggttctgaaccttcaaggagtttgacaatcttatgaatctcttgaaccttctcccccaagaaaaatggtacatacaagtcctacaaataatttccatggggggttcatgggaccccaagggcccacaatgggtttcctaagggcccccaatt

SEQ ID NO: 665 - DNA, 447 bp, Homo sapiens
gctaaatgaggtcctcagctgaatgaggaaccctgtacatccccttgcacagccctattctaaatcgcttaaactatgctgatagctgcttaggttcttgagtagttctgctcttaaacgtagggaggccctgagaactaaattttgccccaaaataaaaacagaaattatgagattgcctcctgtcattttggttaacccagtccttcacctgccctgtgtcagtgtcttctgagggcaattgcgttgctcaaatcactagcacagaggttccttaatttggggccttagaaaccattgtgggccttggggtccatgaaccccatgaaattatttgtagacttgtatgtacatttttctggggagaaggttcaagagattcataagattgtcaaactccttgaaggttccagaacctctgcagggaagggggaagaaaaccctccc

SEQ ID NO: 666 - DNA, 4785 bp, Homo sapiens
acctgcttccctctcggatagccagggctgatgatttcaactcattaatcattccgaactcttcccaacaaacagcctcatggctgtcccggacctcctctgtcccggctcaggaaatgatctcggtcggaagtgaaaagaccaaatcggccccaggaggccattttcttcgacagaagctgaggcgtgggggcgtggccttcccccgcttccccctccactcccccgcccgcccccggccccggctttccgatctcggcccagggaagagccttggtcgcgaatcaccagtttgcatttgcccctggggcgggggcggctttctgagaccaggctggggctgggactccgccaccttcagctaagggtaccgaggtcagtccgggagtcgcgtcaccgggactcgaacccgcctcttcgtcttccgaggcctagtgcgagcctgcggcgctaaacgcagtcacactgtccctttaaggcggcactttttattcttcatttgtttacttcttcatgcgctcttcggtctttacaaaatgtgctcgcgatatccttccgcaagtgtcagtctcaggcactcaccacccgccttgaagccatttctataatcttaagactcgcgagttagcagccgtgggccgacgtctctctttataggatttaattcttttacattttagggactactttttaggaataaaccattcttgcgttagttaataaaggttcataaccttcggaacccctccgctgagaacaaaatacgataatagcctttataacgcaccttttcataaaaatattctgtgaggactctcataggccatcgaatcttctcgtattcctgaaacagaatggtacggtccagaacccgccccatcttctctgcgattggccgtccttcctcagcgagtcgtgtgatttttcaccaatggccgctcgcgtttctttagcgaggtctaagcgatggaaggtggcggccagggagacgccccctacgcgtcctgggattggctacgtcgcacggcgcgcgagggcggcgggcccgaaagataagaactacgactcccggcgccccgcaaagggaactccgttacgcatgcgcacgggcggggcgaaaaagcttctatataaaaggggcgcagaggactgggagacagcagttggaagttggcaggtggagaggcaggttgggagggaaagtcgggggaggacgcggaagaggagctgtgggaagggggaggagggagggaggaaaagaggaggaggcggaggagaactgagcagagcagagcatcgagccaaaggggagatgagtttgtctgtcctctgctgaggctacggccgggcctagggaactgggagcttgggtggaagcgacacccgtggaagtgggaggaggtggcgccgggactttaaccccttgtgggctctgcggcaggggatttaaccctttgtggatctggcccctcggaggcagcgtcatcggtagttttaaccccttcggggctgggtttcacgcactggacttaccctcatcaccttgctcaccaactcctttattggggtgctccgcttggaggtttgaggcccacctccgcccattacgtactgttcctgccgctgcacccccttggacccgctagctggccgcactgtgggcgcttaaccctttactgacttgagctccccagattgcagttggagtttgctgatagaaggactagctaaaggcgtcactgcaggaattacaaactgaagaggactctgttggactgttttttttttctttttcttttttttaagaaaaacccatttttttccttaaggacttactagccaaaatttcttaaacttcgaggactctactagccatggccgagccattcttgtcagaatatcaacaccagcctcaaactagcaactgtacaggtgctgctgctgtccaggaagagctgaaccctgagcgccccccaggcgcggaggagcgggtgcccgaggaggacagtaggtggcaatcgagagcgttcccccagttgggtggccgtccggggccggagggggaagggagcctggaatcccaaccacctcccttgcagacccaggcctgtccagaatctagctgcctgagagagggcgagaagggccagaatggggacgactcgtccgctggcggcgacttcccgccgccggcagaagtggaaccgacgcccgaggccgagctgctcgcccagccttgtcatgactccgaggccagtaagttgggggctcctgccgcagggggcgaagaggagtggggacagcagcagagacagctggggaagaaaaaacataggagacgcccgtccaagaagaagcggcattggaaaccgtactacaagctgacctgggaagagaagaaaaagttcgacgagaaacagagccttcgagcttcaaggatccgagccgagatgttcgccaagggccagccggtcgcgccctataacaccacgcagttcctcatggatgatcacgaccaggaggagccggatctcaaaaccggcctgtactccaagcgggccgccgccaaatccgacgacaccagcgatgacgacttcatggaagaagggggtgaggaggatgggggcagcgatgggatgggaggggacggcagcgagtttctgcagcgggacttctcggagacgtacgagcggtaccacacggagagcctgcagaacatgagcaagcaggagctcatcaaggagtacctggaactggagaagtgcctctcgcgcatggaggacgagaacaaccggctgcggctggagagcaagcggctgggtggcgacgacgcgcgtgtgcgggagctggagctggagctggaccggctgcgcgccgagaacctccagctgctgaccgagaacgaactgcaccggcagcaggagcgagcgccgctttccaagtttggagactagactgaaacttttttgggggagggggcaaaggggactttttacagtgatggaatgtaacattatatacatgtgtatataagacagtggacctttttatgacacataatcagaagagaaatccccctggctttggtttcgtaaatttagctatatgtagcttgcgtgctttctcctgttcttttaattatgtgaaactgaagagttgcttttcttgttttcctttttagaagtttttttccttaatgtgaaagtaatttgaccaagttataatgcatttttgtttttaacaaatcccctccttaaacggagctataaggtggccaaatctgagaacaattaaattcattttagttataataaatttaatatttgtaaatgtaacatagtttcagtgtgatttctagagctaattcaaaatagtattgatatattttatgtgactgcatttttggggaggggtaccgaaatcgttaaatttgtcagtttgcaaaaatatcaatctttaatgggagaattttcaatttgccaattttttccttgaatgggtttaagtatgctacaatatacagttcaggcaaaatttaagatgtaattatcttcaatacttaagtgtgcttgctttctagtgccttggttttctttcttgatgctggaaaaataaacaaaccggtattgagtgtttaggcgagtggaaagtggctacaatccaaaattttaaatttaactctgcctcggccattcaaaagtctaataacaaaaaatgtaaacctaatttggcagtttgttaggttagacaactgacagcctcatttcattcctacaagttggttttcagtaatctcttccttccccccagtaaggctggaagaggctcttggcaaacttcttagtgcaagcaatggttagattaatttgtgaggcagctctttaagacgttcagaggtaagaaatactggatttataaagcaaatggctgtttgggggattccaaggatttacctaattgtccaattctacgtgctctctataccaaaacaaaaaaaaaaagctatccacctttccatgtgggtcaaactaaaattagaaatgtcccctcactgcagatcaaatgtaaagcttccagttaaggagctaaatgaggtcctcagctgaatgaggaaccctgtacatccccttgcacagccctattctaaatcgcttaaactatgctgatagctgcttaggttcttgagtagttctgctcttaaacgtagggaggccctgagaactaaattttgccccaaaataaaaacagaaattatgagattgcctcctgtcattttggttaacccagtccttcacctgccctgtgtcagtgtcttctgagggcaattgcgttgctcaaatcactagcacagaggttccttaatttggggccttagaaaccattgtgggccttggggtccatgaaccccatgaaattatttgtagacttgtatgtacatttttctggggagaaggttcaagagattcataagattgtcaaactccttgaaggttcagaacctctgcagggaagggggaagaaaaccctcccattaggaagcatgcttttgcagttaaatggcgatggtggaggtgatagggacttcaagagtaaaatgcaccttgtattgcataagaagcatacacaaatcaataaatcaagggagattataccagtaggactgaatcagggccttcaaagctggactgagttggtcctgttctggcacatatggtccactggagacaatgtatgattgagtttttctttggtctaaaaattatattaaacatttattttgaaata

SEQ ID NO: 667 - DNA, 436 bp, Homo sapiens
tgttttactaaaatcggtcttgttgcaaaataataacaaataccacagagagccctacatgagaaagccatgtgccttcaagcctggggatgaggactctagttctcaaattcttagaacatagcacatgattctccagggcagagaggctggctggagaatgaggacctcactgctgactctgcttaacaaagtccatgccccaggcacaggcacacatggaatgaggccaccaagcaagtcacacccgcccctgttcccatgaaccccataagagagaagtgctctctgaagtctacagacttggcagggaccacttggaccatggatagcttagagacagttattctgtggccaatgacataaaacctccagaatctgggccctacagttccccttatccaaatttccactaactagggaggtagaagagcaa

SEQ ID NO: 668 - DNA, 448 bp, Homo sapiens
  modified_base (217)..(217): a, c, t or g
cgcatccttttcaccctgccctgccttcagttgagggggcgaagaagaaccctgtgttctcaggaagactgcctccaccaccgctacccagagaacctctgcatctggcatttctgctctctatgcttgagaccgggagtttaggctcagataagtgagctctgggccatgagagggtaggtccagaaggtggggggaactgtacagatcagcaganaggacagttggcagcagtgacctcagtagggaacatgtccgtctaccctctcgcactcatgacacctccccctaccaagccctcctcttcctcctcctcctcctcctgtgggaaggtggtcagtgggacttagggatctttcacctgctgtgcccagtagttctgaagtctgcttgtggagaagtgttttatgtttaatccctggttactgaaagaaccaaatactgggtt

SEQ ID NO: 669 - DNA, 2319 bp, Homo sapiens
gtggagtttgaattgggtggcggttgactgtagagccgctctctctcactggcacagcgaggttttgctcagcccttgtctcgggaccgcagcctccgccgagcgccatggctcctaggaagggcagtagtcgggtggccaagaccaactccttacggaggcggaagctcgcctcctttctgaaagacttcgaccgtgaagtggaaatacgaatcaagcaaattgagtcagacaggcagaacctcctcaaggaggtggataacctctacaacatcgagatcctgcggctccccaaggctctgcgcgagatgaactggcttgactacttcgcccttggaggaaacaaacaggccctggaagaggcggcaacagctgacctggatatcaccgaaataaacaaactaacagcagaagctattcagacacccctgaaatctgccaaaacacgaaaggtaatacaggtagatgaaatgatagtggaagaggaagaagaagaagaaaatgaacgtaagaatcttcaaactgcaagagtcaaaaggtgtcctccatccaagaagagaactcagtccatacaaggaaaaggaaaagggaaaaggtcaagccgtgctaacactgttaccccagccgtgggccgattggaggtgtccatggtcaaaccaactccaggcctgacacccaggtttgactcaagggtcttcaagacccctggcctgcgtactccagcagcaggagagcggatttacaacatctcagggaatggcagccctcttgctgacagcaaagagatcttcctcactgtgccagtgggcggcggagagagcctgcgattattggccagtgacttgcagaggcacagtattgcccagctggatccagaggccttgggaaacattaagaagctctccaaccgtctcgcccaaatctgcagcagcatacggacccacaaatgagacaccaaagttgacaggatggacttttaatgggcacttctgggaccctgaagagacttcttcccttcaggcttattgtttgagtgtgaagttccagagcaaggagccatgttcctctaagggaattcaggaattcagacgtgctagtcccacaccagttaggtagagctgtctgttcaccctcccatcccagctgatcccagtcactgcttgctggggccatgccatggaagcttcccatcagtctcccagctgaatcctccctgctctctgagctgctgccttttgcctcctgcaactcaacatcctcttcaccctgccctgcctgcagttgagggggcgaagaagaaccctgtgttctcaggaagactgcctccaccaccgctacccagagaacctctgcatctggcatttctgctctctatgcttgagaccgggaggtttaggctcagataagtgagctctgggccatgagagggtaggtccagaaggtggggggaactgtacagatcagcagagcaggacagttggcagcagtgacctcagtagggaacatgtccgtctaccctctcgcactcatgacacctccccctaccagccctcctcttcctcctcctcctcctcctgtgggaggtggtcagtgggacttagggatctttcacctgctgtgcccagtagttctgaagtctgcttgtggagcagtgttttatgtttatccctgtttactgaagaccaaatactggtttggagacaacttccatgtcttgctcttctacctccctagttagtggaaatttggataagggaactgtagggcccagattctggaggttttatgtcattggccacagaataactgtctctaagctatccatggtccagtggtccctgccaagtctgtagacttcagagagcacttctctcttatggggttcatgggaacaggggtgggtgtgacttgcttggtggcctcattccatgtgtgcctgtgcctggggcatggactttgttaagcagagtcagcagtgaggtcctcattctccagccagcctctctgccctggagaatcatgtgctatgttctaagaatttgagaactagagtcctcatccccaggcttgaaggcacatggctttctcatgtagggctctctgtggtatttgttattattttgcaacaagaccattttagtaaaacagtcctgttcaagttgtattcttttaagttcttttattctcctttccctgagatttttgtatatattgttctgagtaatggtatctttgagctgattgttctaatcagagctggtacctactttcaataaattctggttttgtgttttcttttgtaaaaaaaaaaaaaaaaaa

SEQ ID NO: 670 - DNA, 475 bp, Homo sapiens
  modified_base (408)..(408): a, c, t or g
  modified_base (467)..(467): a, c, t or g
  modified_base (472)..(472): a, c, t or g
aattaatactgaattttttaatgtgcaaaaatctaactctgctttttaaagcaagtagaaggagtgacaatatggcaccattccaataatcaaacaccaataaaaatggcagcagtacaacaatctaagcaaatctcaaatacaacatacttgtaattagaacacaatgcaatgacttgattttagcaagaactagacacttaatttggtaaaagaaaccaaacaatgcattatattgaatactaagctaagttaccataattagtcttacaaattctcaaatttcacaactacttttgaacatctaaatttaaacctaaattttttaattaaatgcctgttccaacaaagctaattgggaaccaacacatttatggtaaattttaccttcctagaatacccaggggnaaaccagggagacggttattccaaggatggaatgaggaaggtccaatccttttccatcntttgnggt

SEQ ID NO: 671 - DNA, 451 bp, Homo sapiens
  modified_base (433)..(433): a, c, t or g
tttgaacatggtgcggactaaagcagacagtgttccaggcacttacagaaaagtggtggctgctcgagcccccagaaaggtgcttggttcttccacctctgccactaattcgacatcagtttcatcgaggaaagctgaaaataaatatgcaggagggaaccccgtttgcgtgcgcccaactcccaagtggcaaaaaggaattggagaattctttaggttgtcccctaaagattctgaaaaagagaatcagattcctgaagaggcaggaagcagtggcttaggaaaagcaaagagaaaagcatgtcctttgcaacctgatcacacaaatgatgaaaaagaatagaactttctcattcatctttgaataaccgtctccttgtttaccctgggtattctaagaatgtaaatttaccataaatggtggtttgttccnattaagcttggttgaaca

SEQ ID NO: 672 - DNA, 1435 bp, Homo sapiens
gaaacaccctcggctgggaagtcagttcgttctctcctctcctctcttcttgtttgaacatggtgcggactaaagcagacagtgttccaggcacttacagaaaagtggtggctgctcgagcccccagaaaggtgcttggttcttccacctctgccactaattcgacatcagtttcatcgaggaaagctgaaaataaatatgcaggagggaaccccgtttgcgtgcgcccaactcccaagtggcaaaaaggaattggagaattctttaggttgtcccctaaagattctgaaaaagagaatcagattcctgaagaggcaggaagcagtggcttaggaaaagcaaagagaaaagcatgtcctttgcaacctgatcacacaaatgatgaaaaagaatagaactttctcattcatctttgaataacgtctccttgtttaccctggtattctagaatgtaaatttacataaatgtgtttgttccaattagctttgttgaacaggcatttaattaaaaaatttaggtttaaatttagatgttcaaaagtagttgtgaaatttgagaatttgtaagactaattatggtaacttagcttagtattcaatataatgcattgtttggtttcttttaccaaattaagtgtctagttcttgctaaaatcaagtcattgcattgtgttctaattacaagtatgttgtatttgagatttgcttagattgttgtactgctgccatttttattggtgtttgattattggaatggtgccatattgtcactccttctacttgctttaaaaagcagagttagatttttgcacattaaaaaattcagtattaattaaacattacttattctaccctcttttttggcaaggaggacaaatacgcaatgttggaaaaccttggatggatatcttctctttaaaaaaatgtaaagataatttggtcttgagggtttaaacggttgataatgcctctacaacaacaagaaaaaagataaaatactaggatagaatcatggtgggcacagtggcttctcaggaggctgaggagggaggtttgcttgagtccaggagttggagaccagcccaggcaacatagcgtaaaccctatctctaaaacaatttttagccaggtgcggtggctcacgcctgtaatcccagcactctgggaggccgaggcgggtggatcatgaggtcaggagatcgagaccatcctgcctaacaaggtgaaaccccgtctctactaaaaatacaaaaaattagccgggcgcggtggcgggcgcctgtagtcccagctactcgggaggctgaggcaggagaatggcgtgaacccgggaagtggagcttgcagtgagccgagattgcgccactgcagtcggcagtccggcttgggcgacagagcgagactccgtctcaaaaaaaaaaaaaaaaaaaaaaaa

SEQ ID NO: 673 - DNA, 437 bp, Homo sapiens
  modified_base (385)..(385): a, c, t or g
ttttttttttttttttcaatgactcataaattctttattttggctaacactgattgcattcattactaccattttatttattacagctcagaggagagtcatttactagacattcggttgttattaaacactaaaaattaggcagagactggaggggataaggataagagaacaggataaggagagcagaaagacgctcaggagagtagaaagacactcaggagagaacaagagatcctgcccattcttattatgaggatgaactggctacaggacatgagtagcccaatcagatctaacttaaataccagcctctccaaaaaagttttccaataaagatcccctaacaattatttactgggacaaaaaaggttgatatttctangaagagatgatctctttggacacaaaagacccaacttaggacccaactttaa

SEQ ID NO: 674 - DNA, 495 bp, Homo sapiens
ttgatcagcaaaaggaagtggttaacatggcccagaaggctataattagatactttcctgtgtttgaaaagattttaaggggtcacggacaaagctttcttgttggtaatcagctgagccttgcagatgtgattttactccaaaccattttagctctagaagagaaaattcctaatatcctgtctgcatttcctttcctccaggaatacacagtgaaactaagtaatatccctacaattaagagattccttgaacctggcagcaagaagaagcctccccctgatgaaatttatgtgagaacccgtctacaacatctttaggccataaaacaacacatccatgtgtgagtgacagtgtgttcctagagatggtattgtctacagtcatgtcttaatgggatcccagctctgtcatggtgctatctatgtattaagttgggtcctaagttgggtcttttgtgtcaaagagatcatctcttctagaaatatcaaccct

SEQ ID NO: 675 - DNA, 1317 bp, Homo sapiens
agctcccgcgcgctagagccgcctgctggtctcacccagccgggaccgctgacctggcgctttgtgcggctccaggcctccgagtggactccagaaagcctgaaaagctatcatggcagcaaggcccaagctccactatcccaacggaagaggccggatggagtccgtgagatgggttttagctgccgccggagtcgagtttgatgaagaatttctggaaacaaaagaacagttgtacaagttgcaggatggtaaccacctgctgttccaacaagtgcccatggttgaaattgacgggatgaagttggtacagacccgaagcattctccactacatagcagacaagcacaatctctttggcaagaacctcaaggagagaaccctgattgacatgtacgtggaggggacactggatctgctggaactgcttatcatgcatcctttcttaaaaccagatgatcagcaaaaggaagtggttaacatggcccagaaggctataattagatactttcctgtgtttgaaaagattttaaggggtcacggacaaagctttcttgttggtaatcagctgagccttgcagatgtgattttactccaaaccattttagctctagaagagaaaattcctaatatcctgtctgcatttcctttcctccaggaatacacagtgaaactaagtaatatccctacaattaagagattccttgaacctggcagcaagaagaagcctccccctgatgaaatttatgtgagaaccgtctacaacatctttaggccataaaacaacacatccatgtgtgagtgacagtgtgttcctagagatggtattgtctacagtcatgtcttaatggatcccagctctgtcatggtgctatctatgtattaagttgggtcctaagttgggtcttttgtgtcaacgagatcatctcttctagaaatatcaaccttttttgtccagtaaataattgttaggggatctttattggaaaacttttttggagaggctggtatttaagttagatctgattgggctactcatgtcctgtagccagttcatcctcataataagaatgggcaggatctcttgttctctcctgagtgtctttctactctcctgagcgtctttctgctctccttatcctgttctcttatccttatcccctccagtctctgcctaatttttagtgtttaataacaaccgaatgtctagtaaatgactctcctctgagctgtaataaataaaatggtagtaatgaatgcaatcagtattagccaaaataaagaatttatgagtcattaaaaaaaaaaaaaaaaaaa

SEQ ID NO: 676 - DNA, 276 bp, Homo sapiens
  modified_base (11)..(11): a, c, t or g
  modified_base (89)..(89): a, c, t or g
ttttttctttnggaaaagaatgcttctttattgatggttatatttatcagcaaggatcatgactcagtagccagttgaaggaatcagancactttgggtacatgctgctaaaagcccgtcagctcgtcatccttgtttttgtcaacctggtatccagtaagtaccaagtcctcattttgtccgggaagacttttgaatactttcaagtgcatatatttattatcacctgctcgtaccttaatcgtagtaatttgttccagcaacaacttgagtttt

SEQ ID NO: 677 - DNA, 265 bp, Homo sapiens
aaaactcaagttgttgctggaacaaattactacattaaggtacgagcaggtgataataaatatatgcacttgaaagtattcaaaagtcttcccggacaaaatgaggacttggtacttactggataccaggttgacaaaaacaaggatgacgagctgacgggcttttagcagcatgtacccaaagtgttctgattccttcaactggctactgagtcatgatccttgctgataaatataaccatcaataaagaagcattcttttcca

SEQ ID NO: 678 - DNA, 838 bp, Homo sapiens
tgctgtttgtggaaaataaagcattctataggcggagctagtgaacgcctcttttaaaacacgagtctccacacttccctgttcactttggttccagcatcctgtccagcaaagaagcaatcagccaaaatgatacctggaggcttatctgaggccaaacccgccactccagaaatccaggagattgttgataaggttaaaccacagcttgaagaaaaaacaaatgagacttacggaaaattggaagctgtgcagtataaaactcaagttgttgctggaacaaattactacattaaggtacgagcaggtgataataaatatatgcacttgaaagtattcaaaagtcttcccggacaaaatgaggacttggtacttactggataccaggttgacaaaaacaaggatgacgagctgacgggcttttagcagcatgtacccaaagtgttctgattccttcaactggctactgagtcatgatccttgctgataaatataaccatcaataaagaagcattcttttccaaagaaattatttcttcaattatttctcatttattgtattaagcagaaattaccttttctttctcaaaatcagtgttattgctttagagtataaactccatataaattgatggcaattggaaatcttataaaaactagtcaagcctaatgcaactggctaaaggatagtaccaccctcacccccaccataggcaggctggatcgtggactatcaattcaccagcctccttgttccctgtggctgctgataacccaacattccatctctaccctcatacttcaaaattaaatcaagtattttacaaaaaaaaaaaaa

SEQ ID NO: 679 - DNA, 410 bp, Homo sapiens
  modified_base (383)..(383): a, c, t or g
  modified_base (410)..(410): a, c, t or g
cacgagcactgcttagaactcaagttcctgggatcaaacttgtatcacacaggctggagaaggctgtggagaaactgagtcctcccaggtctcaaggtgggtggagggagcctgcaggggtctccttccctcccctcttgcctgttctgcctggtcagagcctgcacacgagtgagagggctcccttagagagggccgggctagaggaagctgaagtttcagaataagcagcttattctgtggcctcctttccactacagactccttgaggaggagtaagaccccagaaggacaggtgagtctcacctaaggctgaccaaagtccagctcagccagcccgtgattcttatccaagacatccgccccacagcagtgaagaagcngatgccactcaaaagccattctcagtn

SEQ ID NO: 680 - DNA, 474 bp, Homo sapiens
  modified_base (373)..(373): a, c, t or g
  modified_base (446)..(446): a, c, t or g
atttttatagataatacagatattttggtaaattgaacttggtttttctttcccagcatcgtggatgtagactgagaatggctttgagtggcatcagcttctcactgctgtgggcggatgtcttggatagatcacgggctggctgagctggactttggtcagcctaggtgagactcacctgtccttctggggtcttactcctcctcaaggagtctgtagtggaaaggaggccacagaataagctgcttattctgaaacttcagcttcctctagcccggccctctctaagggagccctctgcactcgtgtgaggctctgaccaggcagaacaggcaagaggggagggaaggagacccctgcaggctccctccanccaccttgaagacctggggaggactcagtttctcccacaagccttctccagcctgtgtgatacaagtttgatnccaggaacttgagttctaagcagtgctc

SEQ ID NO: 681 - DNA, 3737 bp, Homo sapiens
ggcgtccgcgcacacctccccgcgccgccgccgccaccgcccgcactccgccgcctctgcccgcaaccgctgagccatccatgggggtcgcgggccgcaaccgtcccggggcggcctgggcggtgctgctgctgctgctgctgctgccgccactgctgctgctggcgggggccgtcccgccgggtcggggccgtgccgcggggccgcaggaggatgtagatgagtgtgcccaagggctagatgactgccatgccgacgccctgtgtcagaacacacccacctcctacaagtgctcctgcaagcctggctaccaaggggaaggcaggcagtgtgaggacatcgatgaatgtggaaatgagctcaatggaggctgtgtccatgactgtttgaatattccaggcaattatcgttgcacttgttttgatggcttcatgttggctcatgacggtcataattgtcttgatgtggacgagtgcctggagaacaatggcggctgccagcatacctgtgtcaacgtcatggggagctatgagtgctgctgcaaggaggggtttttcctgagtgacaatcagcacacctgcattcaccgctcggaagagggcctgagctgcatgaataaggatcacggctgtagtcacatctgcaaggaggccccaaggggcagcgtcgcctgtgagtgcaggcctggttttgagctggccaagaaccagagagactgcatcttgacctgtaaccatgggaacggtgggtgccagcactcctgtgacgatacagccgatggcccagagtgcagctgccatccacagtacaagatgcacacagatgggaggagctgccttgagcgagaggacactgtcctggaggtgacagagagcaacaccacatcagtggtggatggggataaacgggtgaaacggcggctgctcatggaaacgtgtgctgtcaacaatggaggctgtgaccgcacctgtaaggatacttcgacaggtgtccactgcagttgtcctgttggattcactctccagttggatgggaagacatgtaaagatattgatgagtgccagacccgcaatggaggttgtgatcatttctgcaaaaacatcgtgggcagttttgactgcggctgcaagaaaggatttaaattattaacagatgagaagtcttgccaagatgtggatgagtgctctttggataggacctgtgaccacagctgcatcaaccaccctggcacatttgcttgtgcttgcaaccgagggtacaccctgtatggcttcacccactgtggagacaccaatgagtgcagcatcaacaacggaggctgtcagcaggtctgtgtgaacacagtgggcagctatgaatgccagtgccaccctgggtacaagctccactggaataaaaaagactgtgtggaagtgaaggggctcctgcccacaagtgtgtcaccccgtgtgtccctgcactgcggtaagagtggtggaggagacgggtgcttcctcagatgtcactctggcattcacctctcttcagatgtcaccaccatcaggacaagtgtaacctttaagctaaatgaaggcaagtgtagtttgaaaaatgctgagctgtttcccgagggtctgcgaccagcactaccagagaagcacagctcagtaaaagagagcttccgctacgtaaaccttacatgcagctctggcaagcaagtcccaggagcccctggccgaccaagcacccctaaggaaatgtttatcactgttgagtttgagcttgaaactaaccaaaaggaggtgacagcttcttgtgacctgagctgcatcgtaaagcgaaccgagaagcggctccgtaaagccatccgcacgctcagaaaggccgtccacagggagcagtttcacctccagctctcaggcatgaacctcgacgtggctaaaaagcctcccagaacatctgaacgccaggcagagtcctgtggagtgggccagggtcatgcagaaaaccaatgtgtcagttgcagggctgggacctattatgatggagcacgagaacgctgcattttatgtccaaatggaaccttccaaaatgaggaaggacaaatgacttgtgaaccatgcccaagaccaggaaattctggggccctgaagaccccagaagcttggaatatgtctgaatgtggaggtctgtgtcaacctggtgaatattctgcagatggctttgcaccttgccagctctgtgccctgggcacgttccagcctgaagctggtcgaacttcctgcttcccctgtggaggaggccttgccaccaaacatcagggagctacttcctttcaggactgtgaaaccagagttcaatgttcacctggacatttctacaacaccaccactcaccgatgtattcgttgcccagtgggaacataccagcctgaatttggaaaaaataattgtgtttcttgcccaggaaatactacgactgactttgatggctccacaaacataacccagtgtaaaaacagaagatgtggaggggagctgggagatttcactgggtacattgaatccccaaactacccaggcaattacccagccaacaccgagtgtacgtggaccatcaacccaccccccaagcgccgcatcctgatcgtggtccctgagatcttcctgcccatagaggacgactgtggggactatctggtgatgcggaaaacctcttcatccaattctgtgacaacatatgaaacctgccagacctacgaacgccccatcgccttcacctccaggtcaaagaagctgtggattcagttcaagtccaatgaagggaacagcgctagagggttccaggtcccatacgtgacatatgatgaggactaccaggaactcattgaagacatagttcgagatggcaggctctatgcatctgagaaccatcaggaaatacttaaggataagaaacttatcaaggctctgtttgatgtcctggcccatccccagaactatttcaagtacacagcccaggagtcccgagagatgtttccaagatcgttcatccgattgctacgttccaaagtgtccaggtttttgagaccttacaaatgactcagcccacgtgccactcaatacaaatgttctgctatagggttggtgggacagagctgtcttccttctgcatgtcagcacagtcgggtattgctgcctcccgtatcagtgactcattagagttcaatttttatagataatacagatattttggtaaattgaacttggtttttctttcccagcatcgtggatgtagactgagaatggctttgagtggcatcagcttctcactgctgtgggcggatgtcttggatagatcacgggctggctgagctggactttggtcagcctaggtgagactcacctgtccttctggggtcttactcctcctcaaggagtctgtagtggaaaggaggccacagaataagctgcttattctgaaacttcagcttcctctagcccggccctctctaagggagccctctgcactcgtgtgcaggctctgaccaggcagaacaggcaagaggggagggaaggagacccctgcaggctccctccacccaccttgagacctgggaggactcagtttctccacagccttctccagcctgtgtgatacaagtttgatcccaggaacttgagttctaagcagtgctcgtgaaaaaaaaaagcagaaagaattagaaataaataaaaactaagcacttctggagacat

SEQ ID NO: 682 - DNA, 565 bp, Homo sapiens
  modified_base (488)..(488): a, c, t or g
  modified_base (519)..(519): a, c, t or g
  modified_base (525)..(525): a, c, t or g
  modified_base (534)..(534): a, c, t or g
tttttttttttttgacccgttgtttaagattttaataaaggtggggcaaagggttgaattggtcgaaaagtcctcaacgtcctgacgggactcccctgaagccaaggcagtttgagtccattcattattctgtcttggatcttaggcaaagccccgggccccttggagcagcaccagggttcccgacacccccaccgacaggtcgaacgtgcacaggctgggaccacgccggagttcattgagccctcgtgggggagggcagttccagggaccaggaagggattcccgtccagtgtcaggttatccacctcgggcagctcgtcaggctgcggcgccctgttcagtctgttgcagctgagatcgagcactctgagcttggctggcagtcctttaggcacctgttccagcccagcgaacgacagattgagggagttcagggcgctggaccacatgcattcggagcgctagggtttacggtggcccccaantttgtggctgaggttaggctgtggggctganactgcngcgccatgngacaacgctgtgggtctccatcctgtttcgc

SEQ ID NO: 683 - DNA, 433 bp, Homo sapiens
  modified_base (7)..(7): a, c, t or g
  modified_base (242)..(242): a, c, t or g
  modified_base (345)..(345): a, c, t or g
gcgaagnagttcacaagtgtgaagcctggaagccggcgggtgcgctcgtgtaggaaagaagctaaagcacttccagagcctgtccggagctcagaggttcggaagacttatcgaccatggagcgcgcgtcctgcttgttgctgctgctgctgccgctggtgcacgtctctgcgaccacgccagaaccttgtgagctggacgatgaagatttccgctgcgtctgcaacttctccgaacctcancccgactggtccgaagccttccagtgtgtgtctgcagtagaggtggagatccatgccggcggtctcaacctagagccgtttctaaagcgcgtcgatgcggacnccgacccgcggcagtatgctggacacggtcaaggctctccgcgtgcgcggctcacagtgggagccaacaggttcctgctcagctacta

SEQ ID NO: 684 - DNA, 1367 bp, Homo sapiens
ccggccggccgaagagttcacaagtgtgaagcctgaagccgccgggtgccgctgtgtagaaagaagctaaagcacttccagagcctgctgagctcagaggttcggaagacttatcgaccatggagcgcgcgtcctgcttgttgctgctgctgctgccgctggtgcacgtctctgcgaccacgccagaaccttgtgagctggacgatgaagatttccgctgcgtctgcaacttctccgaacctcagcccgactggtccgaagccttccagtgtgtgtctgcagtagaggtggagatccatgccggcggtctcaacctagagccgtttctaaagcgcgtcgatgcggacgccgacccgcggcagtatgctgacacggtcaaggctctccgcgtgcggcggctcacagtgggagccgcacaggttcctgctcagctactggtaggcgccctgcgtgtgctagcgtactcccgcctcaaggaactgacgctcgaggacctaaagataaccggcaccatgcctccgctgcctctggaagccacaggacttgcactttccagcttgcgcctacgcaacgtgtcgtgggcgacagggcgttcttggctcgccgagctgcagcagtggctcaagccaggcctcaaggtactgagcattgcccaagcacactcgcctgccttttcctgcgaacaggttcgcgccttcccggcccttaccagcctagacctgtctgacaatcctggactgggcgaacgcggactgatggcggctctctgtccccacaagttcccggccatccagaatctagcgctgcgcaacacaggaatggagacgcccacaggcgtgtgcgccgcactggcggcggcaggtgtgcagccccacagcctagacctcagccacaactcgctgcgcgccaccgtaaaccctagcgctccgagatgcatgtggtccagcgccctgaactccctcaatctgtcgttcgctgggctggaacaggtgcctaaaggactgccagccaagctcagagtgctcgatctcagctgcaacagactgaacagggcgccgcagcctgacgagctgcccgaggtggataacctgacactggacgggaatcccttcctggtccctggaactgccctcccccacgagggctcaatgaactccggcgtggtcccagcctgtgcacgttcgaccctgtcggtgggggtgtcgggaaccctggtgctgctccaaggggcccggggctttgcctaagatccaagacagaataatgaatggactcaaactgccttggcttcaggggagtcccgtcaggacgttgaggacttttcgaccaattcaaccctttgccccacctttattaaaatcttaaac

SEQ ID NO: 685 - DNA, 574 bp, Homo sapiens
  modified_base (75)..(75): a, c, t or g
  modified_base (80)..(81): a, c, t or g
  modified_base (83)..(83): a, c, t or g
  modified_base (85)..(85): a, c, t or g
  modified_base (87)..(87): a, c, t or g
  modified_base (92)..(92): a, c, t or g
  modified_base (98)..(98): a, c, t or g
  modified_base (112)..(112): a, c, t or g
  modified_base (232)..(234): a, c, t or g
  modified_base (477)..(477): a, c, t or g
  modified_base (501)..(501): a, c, t or g
  modified_base (517)..(517): a, c, t or g
  modified_base (556)..(556): a, c, t or g
ttttgccgatgctactattttattgcaggaggtgggggtgtatgcaccgcacaccggggctatgagaagcaaganaaaannangnanggcanagcctntgactgagcaacanaggccgcctgctgccttctctgtctgtctcctggtgcaggcacattggggagaccttccccaaggcaggggccaccagtccaggggtgggaatacagggggtgggaggtgtgcataagannntgataggcacaggccagcccggtacagacccctaggcgtcctgacaggtggatttcgacaaggtcattgtgccctgccaaggcacagcgtagatctggaaagagcagaatgcttttccttttcagatgtggctggtcatggaaggggcagttgtccaagttgggctgggtcttggtacacgtggttcggcccagctccacgtccaagaagtagttcaccccagctacgatctgcttgcgggcncgcaccacctgcagcgcgcggctntggtacatgtcgtttncctggctttgttgtctcgcccacggaaaagtccattgangccggaaaccctcccctc

SEQ ID NO: 686 - DNA, 474 bp, Homo sapiens
  modified_base (81)..(81): a, c, t or g
  modified_base (375)..(375): a, c, t or g
  modified_base (406)..(406): a, c, t or g
  modified_base (409)..(409): a, c, t or g
  modified_base (422)..(422): a, c, t or g
  modified_base (433)..(433): a, c, t or g
  modified_base (437)..(437): a, c, t or g
  modified_base (441)..(441): a, c, t or g
  modified_base (443)..(443): a, c, t or g
  modified_base (445)..(446): a, c, t or g
  modified_base (449)..(449): a, c, t or g
  modified_base (455)..(455): a, c, t or g
  modified_base (464)..(464): a, c, t or g
  modified_base (468)..(468): a, c, t or g
ggagggtgtgcggcgtgactcggactttgccgactcgacgtacaacaaagccagcaacgacatgtaccacagccgcgcgcntgcaggtggtgcgcccagcaagcagatcgtagctggggtgaactacttcttggacgtggagctgggccgaaccacgtgtaccaagacccagcccaacttggacaactgccccttccatgaccagccacatctgaaaaggaaagcattctgctctttccagatctacgctgtgccttggaggggcacaattgaccttgtcgaaatccacctgtcaggacgcctaggggtctgtaccgggctggcctgtgcctatcacctcttatgcacacctcccaccccctgtattcccacccntgggactggtggcccctgccttggggaaggnctncccatgtgcctgnaccaggggganaganaganangnnagnaggggnctttgttgntagnaagggg

SEQ ID NO: 687 - DNA, 818 bp, Homo sapiens
cgcagcgggtcctctctatctagctccagcctctcgcctgcgccccactccccgcgtcccgcgtcctagccgaccatggccgggcccctgcgcgccccgctgctcctgctggccatcctggccgtggccctggccgtgagccccgcggccggctccagtcccggcaagccgccgcgcctggtgggaggccccatggacgccagcgtggaggaggagggtgtgcggcgtgcactggactttgccgtcggcgagtacaacaaagccagcaacgacatgtaccacagccgcgcgctgcaggtggtgcgcgcccgcaagcagatcgtagctggggtgaactacttcttggacgtggagctgggccgaaccacgtgtaccaagacccagcccaacttggacaactgccccttccatgaccagccacatctgaaaaggaaagcattctgctctttccagatctacgctgtgccttggcagggcacaatgaccttgtcgaaatccacctgtcaggacgcctaggggtctgtaccgggctggcctgtgcctatcacctcttatgcacacctcccaccccctgtattcccacccctggactggtggcccctgccttggggaaggtctccccatgtgcctgcaccaggagacagacagagaaggcagcaggcggcctttgttgctcagcaaggggctctgccctccctccttccttcttgcttctcatagccccggtgtgcggtgcatacacccccacctcctgcaataaaatagtagcatcggcaaaaaaaaaaaaaaaaaaaaaaaaaaaaaaaaaaaaaaaaaaa

SEQ ID NO: 688 - DNA, 278 bp, Homo sapiens
  modified_base (41)..(41): a, c, t or g
  modified_base (56)..(56): a, c, t or g
  modified_base (92)..(92): a, c, t or g
  modified_base (180)..(180): a, c, t or g
  modified_base (249)..(249): a, c, t or g
  modified_base (273)..(273): a, c, t or g
atttcacaatcatctttattacagtaggatgattcgtcctngggccaccagcctanaaccttgcagccttaggaaagacctgtgtcaacagngcttgctccctctctagacaggggctcagcacctccagggcatccctgctgcattttccctgctggaggatggggcagagggacaatnggagaggagggcatgaccccaccccaggctatagcagctccttggccacaaagatccttttgccagtangcagaagggaggaaaacatgcaanccacc

SEQ ID NO: 689 - DNA, 433 bp, Homo sapiens
  modified_base (46)..(46): a, c, t or g
  modified_base (157)..(157): a, c, t or g
  modified_base (159)..(159): a, c, t or g
  modified_base (190)..(190): a, c, t or g
  modified_base (227)..(227): a, c, t or g
  modified_base (243)..(243): a, c, t or g
  modified_base (282)..(282): a, c, t or g
  modified_base (284)..(284): a, c, t or g
gcagttgggaagaatttattatcactaagtggccctgacagatcanggaggagggggtgacactaacgaggctgctacaatcagctcccctagaggcagcgattaagggctcattacccgctggggtggaggggagcctgggaaaggcagcggggcngnggggattaggttaggaggtggggcagtttanagggaagaagagtgggacacccccaggggagtccaanggacggcctggcctgngagaagagtgaggttaccctcccaccccccactgggganantatgactaaggaagcccccagaagggcttgaaaggagaatgtcccagggaagtgagctgagacactgggagctgggtgcacagcaggcgggggcagcctggcaggagtaggggtgtcacggcttctccagctggacatctcctatgttg

SEQ ID NO: 690 - DNA, 458 bp, Homo sapiens
  modified_base (201)..(201): a, c, t or g
  modified_base (297)..(297): a, c, t or g
  modified_base (457)..(457): a, c, t or g
acaggtgcagggagcagtttctctccactcacagcctgaagcatacccggcaggcatcgtccccaggcccaacaagcaaagggcccagtagcgagggcactggagcccatctccggggggctgggcaggaagtagggtggggtttggggtagggatctggtaccctgggactgctgcaactcaaactaaccaacccactgngagaagatgcctgggggtccaggagtcctccaagctctgcctgccaccatcttcctcctcttcctgctgtctgctgtctacctgggccctgggtgncaggccctgtggatgcacaaaggtcccagcatcattgatggtgagcctgggggaaagacgcccacttccaattgcccgcacaataagcaagcaacaacgccaacgtcacctggttggcgcgtccctccatggcaactacacgttggccccctgagttttng

SEQ ID NO: 691 - DNA, 1246 bp, Homo sapiens
ctgaagcatacccggcaggggctgtccccaggcccaacaagcaaagggcccagtagcgagggccactggagcccatctccggggggctgggcaggaagtagggtggggtttggggtagggatctggtaccctgggactgctgcaactcaaactaaccaacccactgggagaagatgcctgggggtccaggagtcctccaagctctgcctgccaccatcttcctcctcttcctgctgtctgctgtctacctgggccctgggtgccaggccctgtggatgcacaaggtcccagcatcattgatggtgagcctgggggaagacgcccacttccaatgcccgcacaatagcagcaacaacgccaacgtcacctggtggcgcgtcctccatggcaactacacgtggccccctgagttcttgggcccgggcgaggaccccaatggtacgctgatcatccagaatgtgaacaagagccatgggggcatatacgtgtgccgggtccaggagggcaacgagtcataccagcagtcctgcggcacctacctccgcgtgcgccagccgccccccaggcccttcctggacatgggggagggcaccaagaaccgaatcatcacagccgaggggatcatcctcctgttctgcgcggtggtgcctgggacgctgctgctgttcaggaaacgatggcagaacgagaagctcgggttggatgccggggatgaatatgaagatgaaaacctttatgaaggcctgaacctggacgactgctccatgtatgaggacatctcccggggcctccagggcacctaccaggatgtgggcagcctcaacataggagatgtccagctggagaagccgtgacacccctactcctgccaggctgcccccgcctgctgtgcacccagctccagtgtctcagctcacttccctgggacattctcctttcagcccttctgggggcttccttagtcatattcccccagtggggggtgggagggtaacctcactcttctccaggccaggcctccttggactcccctgggggtgtcccactcttcttccctctaaactgccccacctcctaacctaatccccccgccccgctgcctttcccaggctcccctcaccccagcgggtaatgagcccttaatcgctgcctctaggggagctgattgtagcagcctcgttagtgtcaccccctcctccctgatctgtcagggccacttagtgataataaattcttcccaactgca

SEQ ID NO: 692 - DNA, 299 bp, Homo sapiens
  modified_base (190)..(190): a, c, t or g
  modified_base (199)..(199): a, c, t or g
  modified_base (205)..(205): a, c, t or g
  modified_base (224)..(224): a, c, t or g
  modified_base (238)..(239): a, c, t or g
  modified_base (243)..(243): a, c, t or g
  modified_base (262)..(262): a, c, t or g
  modified_base (287)..(287): a, c, t or g
  modified_base (296)..(296): a, c, t or g
tgattggcttaaatgccaatgtagtttgtttctttgtctttgtacctggttctcttttctgtttcttttctaatctttgttttaggccttctagttccacaccatcttcttgagggcttccttcagtattttcattcttaattttctttttatttttcttttctgcctctgctttcatttctatggttantcgtggaangactcnttgaccacgcggagaaggnaaaacttcaggcannttgnggtgtttttcccccttggnccttcccccctttccccagggaagncgaacttgntca

SEQ ID NO: 693 - DNA, 528 bp, Homo sapiens
aggctcgtttatttattcattgatcaactggcacttcttgaaagcctgctgtgtgccaagcctttccccaaaggaggatatcagtggtggagccaagtctcagggtggaaaggacctggaccacacagagcaggactccagagcctcctccatatggcaggaatcaagctttcacaggggaaacgcaggatttcccacacatgcccatgcaacacttcaagtcacgcttgcactggccatccatctcacagaaattgggggggttaagcatcaaacattggccataagtcactgggcacttcccaggcttcctccttgttgggtttggggtgtcaacaggatccaggcatttgatgccacaagtgtcaggacaacatctcttcttccctggacactgccagtcactctggcactcaggtttcttgtatctaaggcactgggcagatttcttaggaggacagactccagctttgaaggactttccagagccttccacagcccaaggtgccagagttcccagggcaagca

SEQ ID NO: 694 - DNA, 598 bp, Homo sapiens
cagagtcactcctgccttcaccatgaagtccagcggcctcttccccttcctggtgctgcttgccctgggaactctggcaccttgggctgtggaaggctctggaaagtccttcaaagctggagtctgtcctcctaagaaatctgcccagtgccttagatacaagaaacctgagtgccagagtgactggcagtgtccagggaagaagagatgttgtcctgacacttgtggcatcaaatgcctggatcctgttgacaccccaaacccaacaaggaggaagcctgggaagtgcccagtgacttatggccaatgtttgatgcttaacccccccaatttctgtgagatggatggccagtgcaagcgtgacttgaagtgttgcatgggcatgtgtgggaaatcctgcgtttcccctgtgaaagcttgattcctgccatatggaggaggctctggagtcctgctctgtgtggtccaggtcctttccaccctgagacttggctccaccactgatatcctcctttggggaaaggcttggcacacagcaggctttcaagaagtgccagttgatcaatgaataaataaacgagcctatttctctttgcac

SEQ ID NO: 695 - DNA, 517 bp, Homo sapiens
tttctcatgggtcactgaggctttttattttgagcacaaaaccaccgggggatctagcctgtggccaccccgggagatgacacgaggctcacatgactctagacacttggtggaagtgaggcgagaaaaacaatgacttgggccaattacacggcctgcaaacgtagacctgcccaacaggcgccaagggacgtggcatcctttagaattcctaaggaacggttcagaacctcaaggcggtggggcgccaactatacaaggacccctccaaattttggtcgggggcctctaacttccttagcttacacaaagggaggggtctgtgtatccaacaggtgaccgaaggctctgcctgcccacagcttacttggccaaggggtttctgaagttcctgccggcaaacttagccttgctgcccagctcctcttcaattctgaggagctggttgtacttggtcaagcgctcagatcggcaaggggcaccagtcttggatctgccagtgcacaacccacaacca

SEQ ID NO: 696 - DNA, 1812 bp, Homo sapiens
tagctaggcaggaagtcggcgcgggcggcgcggacagtatctgtgggtacccggagcacggagatctcgccggctttacgttcacctcggtgtctgcagcaccctccgcttcctctcctaggcgacgagacccagtggctagaagttcaccatgtctattctcaagatccatgccagggagatctttgactctcgcgggaatcccactgttgaggttgatctcttcacctcaaaaggtctcttcagagctgctgtgcccagtggtgcttcaactggtatctatgaggccctagagctccgggacaatgataagactcgctatatggggaagggtgtctcaaaggctgttgagcacatcaataaaactattgcgcctgccctggttagcaagaaactgaacgtcacagaacaagagaagattgacaaactgatgatcgagatggatggaacagaaaataaatctaagtttggtgcgaacgccattctgggggtgtcccttgccgtctgcaaagctggtgccgttgagaagggggtccccctgtaccgccacatcgctgacttggctggcaactctgaagtcatcctgccagtcccggcgttcaatgtcatcaatggcggttctcatgctggcaacaagctggccatgcaggagttcatgatcctcccagtcggtgcagcaaacttcagggaagccatgcgcattggagcagaggtttaccacaacctgaagaatgtcatcaaggagaaatatgggaaagatgccaccaatgtgggggatgaaggcgggtttgctcccaacatcctggagaataaagaaggcctggagctgctgaagactgctattgggaaagctggctacactgataaggtggtcatcggcatggacgtagcggcctccgagttcttcaggtctgggaagtatgacctggacttcaagtctcccgatgaccccagcaggtacatctcgcctgaccagctggctgacctgtacaagtccttcatcaaggactacccagtggtgtctatcgaagatccctttgaccaggatgactggggagcttggcagaagttcacagccagtgcaggaatccaggtagtgggggatgatctcacagtgaccaacccaaagaggatcgccaaggccgtgaacgagaagtcctgcaactgcctcctgctcaaagtcaaccagattggctccgtgaccgagtctcttcaggcgtgcaagctggcccaggccaatggttggggcgtcatggtgtctcatcgttcgggggagactgaagataccttcatcgctgacctggttgtggggctgtgcactgggcagatcaagactggtgccccttgccgatctgagcgcttggccaagtacaaccagctcctcagaattgaagaggagctgggcagcaaggctaagtttgccggcaggaacttcagaaaccccttggccaagtaagctgtgggcaggcaagcccttcggtcacctgttggctacacagacccctcccctcgtgtcagctcaggcagctcgaggcccccgaccaacacttgcaggggtccctgctagttagcgccccaccgccgtggagttcgtaccgcttccttagaacttctacagaagccaagctccctggagccctgttggcagctctagctttgcagtcgtgtaattggcccaagtcattgtttttctcgcctcactttccaccaagtgtctagagtcatgtgagcctcgtgtcatctccggggtggccacaggctagatccccggtggttttgtgctcaaaataaaaagcctcagtgacccatgag

SEQ ID NO: 697 - DNA, 421 bp, Homo sapiens
gaaatgtaagtatacagattttaatttatttttaagaataattgtatattttaaaaacaggacacgtactgtatgagtaaacagcgtggctaacaccaagtccacactggtaagcttttgagaaccatttacactatgttgacagtagtactgctgcaggcagacagcggaagaataaataatagtgcttcaagaagagtagtgattgagaggataggtaaagagggcgcctcatcgtggaagctagagcaggaacacctccccagtagtgacatgtgcaaagttccagatctccactgacaaagacagctcaacccactggaacaaacagactcccaatgtggctggcaactgcgggggtagaagaactcaggcaaagtaggcacaggaatgggggagatgagagccaagggacaaacgc

SEQ ID NO: 698 - DNA, 461 bp, Homo sapiens
ctgtatggcagcgctcctcgaacacctagcaagcggcgaggactggctcccaatacaccgggcaaagcacgtaagctgaacactaccaccatgtccaatgctacggccaatagtagcattcggcctatctttggagggacagtctaccactcccccgtgtctcgacttcctccttctggcagcaagcagtcgctgcttccacctgttcagggaagaaaacaccccgtactggcaggcatggagccaacaaggagaacctggagctcaacggcagcatcctgagtggtgggtaccctggctcggcccccctccagcgcaacttcagcattaattctgtttgccagcacctattctgagtttgcgaaggatccgtccctctctgacagttccactgttgggcttcaggacagccttcctcctgaagagaatgtctttgtgtgtccgaagttgagatgggcctg

SEQ ID NO: 699 - DNA, 3128 bp, Homo sapiens
gcttcgccccgtggcgcggtttgaaattttgcggggctcaacggctcgcggagcggctacgcggagtgacatcgccggtgtttgcgggtggttgttgctctcggggccgtgtggagtaggtctggacctggactcacggctgcttggagcgtccgccatgaggagaagtgaggtgctggcggaggagtccatagtatgtctgcagaaagccctaaatcaccttcgggaaatatgggagctaattgggattccagaggaccagcggttacaaagaactgaggtggtaaagaagcatatcaaggaactcctggatatgatgattgctgaagaggaaagcctgaaggaaagactcatcaaaagcatatccgtctgtcagaaagagctgaacactctgtgcagcgagttacatgttgagccatttcaggaagaaggagagacgaccatcttgcaactagaaaaagatttgcgcacccaagtggaattgatgcgaaaacagaaaaaggagagaaaacaggaactgaagctacttcaagagcaagatcaagaactgtgcgaaattctttgtatgccccactatgatattgacagtgcctcagtgcccagcttagaagagctgaaccagttcaggcaacatgtgacaactttgagggaaacaaaggcttctaggcgtgaggagtttgtcagtataaagagacagatcatactgtgtatggaagaattagaccacaccccagacacaagctttgaaagagatgtggtgtgtgaagacgaagatgccttttgtttgtctttggagaatattgcaacactacaaaagttgctacggcagctggaaatgcagaaatcacaaaatgaagcagtgtgtgaggggctgcgtactcaaatccgagagctctgggacaggttgcaaatacctgaagaagaaagagaagctgtggccaccattatgtctgggtcaaaggccaaggtccggaaagcgctgcaattagaagtggatcggttggaagaactgaaaatgcaaaacatgaagaaagtgattgaggcaattcgagtggagctggttcagtactgggaccagtgcttttatagccaggagcagagacaagcttttgcccctttctgtgctgaggactacacagaaagtctgctccagctccacgatgctgagattgtgcggttaaaaaactactatgaagttcacaaggaactctttgaaggtgtccagaagtgggaagaaacctggaggcttttcttagagtttgagagaaaagcttcagatccaaatcgatttacaaaccgaggaggaaatcttctaaaagaagaaaaacaacgagccaagctccagaaaatgctgcccaagctggaagaagagttgaaggcacgaattgaattgtgggaacaggaacattcaaaggcatttatggtgaatgggcagaaattcatggagtatgtggcagaacaatgggagatgcatcgattggagaaagagagagccaagcaggaaagacaactgaagaacaaaaaacagacagagacagagatgctgtatggcagcgctcctcgaacacctagcaagcggcgaggactggctcccaatacaccgggcaaagcacgtaagctgaacactaccaccatgtccaatgctacggccaatagtagcattcggcctatctttggagggacagtctaccactcccccgtgtctcgacttcctccttctggcagcaagccagtcgctgcttccacctgttcagggaagaaaacaccccgtactggcaggcatggagccaacaaggagaacctggagctcaacggcagcatcctgagtggtgggtaccctggctcggcccccctccagcgcaacttcagcattaattctgttgccagcacctattctgagtttgcgaaggatccgtccctctctgacagttccactgttgggcttcagcgagaactttcaaaggcttccaaatctgatgctacttctggaatcctcaattcaaccaacatccagtcctgagaagccctgatcagtcaaccagctgtggcttcctgtgcctagactggacctaattatatgggggtgactttagtttttcttcagcttaggcgtgcttgaaaccttggccaggttccatgaccatgggcctaacttaaagatgtgaatgagtgttacagttgaaagcccatcataggtttagtggtcctaggagacttggttttgacttatatacatgaaaagtttatggcaagaagtgcaaattttagcatatggggcctgacttctctaccacataattctacttgctgaagcatgatcaaagcttgttttatttcaccactgtaggaaaatgattgactatgcccatccctgggggtaattttggcatgtatacctgtaactagtaattaacatcttttttgtttaggcatgttcaattaatgctgtagctatcatagctttgctcttacctgaagccttgtccccaccacacaggacagccttcctcctgaagagaatgtctttgtgtgtccgaagttgagatggcctgccctactgccaaagaggtgacaggaaggctgggagcagctttgttaaattgtgttcagttctgttacacagtgcattgccctttgttgggggtatgcatgtatgaacacacatgcttgtcggaacgctttctcggcgtttgtcccttggctctcatctcccccattcctgtgcctactttgcctgagttcttctacccccgcagttgccagccacattgggagtctgtttgttccaatgggttgagctgtctttgtcgtggagatctggaactttgcacatgtcactactggggaggtgttcctgctctagcttccacgatgaggcgccctctttacctatcctctcaatcactactcttcttgaagcactattatttattcttccgctgtctgcctgcagcagtactactgtcaacatagtgtaaatggttctcaaaagcttaccagtgtggacttggtgttagccacgctgtttactcatacagtacgtgtcctgtttttaaaatatacaattattcttaaaaataaattaaaatctgtatacttacatttcaaaaagaaaaaaaaaaaaaaaa

SEQ ID NO: 700 - DNA, 445 bp, Homo sapiens
  modified_base (341)..(341): a, c, t or g
  modified_base (374)..(374): a, c, t or g
  modified_base (413)..(413): a, c, t or g
  modified_base (430)..(430): a, c, t or g
cactcttatgggtccatctttaattatgttaaatattaataaaagtacagcgtaactgcgattcacttaacataccttacaggactaagggagtacaatttaacacggtcacaacttttgagaacaaaaaggaacttcaataccatgttgtgagaaatgctccaatttgctttggttttgaatggcaggctcgagaaccaccgcccagaacggaacctattctgtcagcaagaagccgggcctcgaatgagaggaagcagaggcagccgaaagtgccctctggagaagaaaggcccctggagggaaaaaccatgtctgggatggcatttgagtgggcacanaagggatggggactgcatatataaaaaaagatnccgcataataaacccaaataatatttgggaataataccnttcaggtaataccttcncgtaagaaagcccga

SEQ ID NO: 701 - DNA, 622 bp, Homo sapiens
  modified_base (167)..(167): a, c, t or g
  modified_base (266)..(266): a, c, t or g
  modified_base (298)..(298): a, c, t or g
  modified_base (514)..(514): a, c, t or g
  modified_base (538)..(538): a, c, t or g
  modified_base (543)..(543): a, c, t or g
  modified_base (608)..(608): a, c, t or g
  modified_base (621)..(621): a, c, t or g
cacttgcgtgtggtcaaagttcctcacccagcaagggactatagatactcgtgtcccaattccaaaacacaatgcacaagctgaacttgggctgaacgtggcgtgttgagatttggaatgaggtttctaagagccgtgttcttcatggaattttccaggccacttgncagcttggtttaccgatggatgggctagagatcttgtcgtttcttggaagtcacagggaagattgaagagaacgcttgagcatccttggcaacagccanggtgggacctggactgaagctttgcactcaangtattgtcaagggaagcttcctgtgaaccaaagttctcaggccaaggtctcgcccaccaaagccagaaagtgcaagcacccgtctacccagctctaaacttgtatgtgtgagacagaccaggcttcgggggtaggaggatctgcagttgttcagccgtctttctgctggtgttgtctttctggccatcagagaagggacacacagcccgttcgaangtgtgcagagggctctgagcgcangatgncaagggctgtttttgctactgaaggagcgtgtgtcctgaactcccacttgcagggacagtcccancttctctatagcng

SEQ ID NO: 702 - DNA, 4713 bp, Homo sapiens
ggaaatctggcattttttaaagtttgcgccccacaaagaggaaatattccaaaggtactcaggatgtaaaaggggagatcttcacagatgcctccgtggatggcatggcaatccatccatcaatgagaagaccatgatttcttttaattttctgtgtgtttccacattccccagtgagaattcttccacctttttttgtgccatgggaaaaacctgaagggcaggcagagctgctcccgaacttgtgaccttctctgaggttgcagcggctcttgtagaacatgactctgggacatcacttccttttgttttctttcggagctgaaccaaagaatgtgcaccctctttctctagtgctgtggtgtctgcttatttttgtatttgtgctttccatccatcttctgtgatcacaaggcattcttaaggttttctagcacgacttgcggacatccagactcgtggggggcccacccatggctcggtaagccagcagcccagggcactggcactaccatgaggcactgcattaattgctgcatacagctgttacccgacggcgcacacaagcagcaggtcaactgccaagggggcccccatcacggtcaccaggcgtgccccacgtgcaaaggagaaaacaaaattctgtttcgtgtggacagtaagcagatgaacttgcttgctgttctcgaagtgaggactgaagggaacgaaaactggggtgggtttttgcgcttcaaaaaggggaagcgatgtagcctcgtttttggactgataataatgaccttggtaatggcttcttacatcctttctggggcccaccaagagcttctgatctcatcacctttccattacggaggcttccccagcaaccccagcttgatggacagcgaaaacccaagtgacacaaaggagcatcaccaccaatcctctgtaaataatatttcatacatgaaggactatccaagcattaaattaattatcaacagcatcacaactaggattgagttcacgaccagacagctcccagacttagaagaccttaagaagcaggagttgcatatgttttcagtcatccccaacaaattccttccaaacagtaagagcccctgttggtacgaggagttctcggggcagaacaccaccgacccctacctcaccaactcctacgtgctctactccaagcgcttccgctccaccttcgacgccctgcgcaaggccttctggggccacctggcgcacgcgcacgggaagcacttccgcctgcgctgcctgccgcacttctacatcatagggcagcccaagtgcgggaccacagacctctatgaccgcctgcggctgcaccctgaggtcaagttctccgccatcaaggagccacactggtggacccggaagcgctttggaatcgtccgcctaagagatgggctgcgagaccgctatcccgtggaagattatctggacctctttgacctggccgcacaccagatccatcaaggactgcaggccagctctgcaaaggagcagagcaagatgaatacaatcattatcggggaggccagtgcctccacgatgtgggataataatgcctggacgttcttctacgacaacagcacggatggcgagccaccgtttctgacgcaggacttcatccacgcctttcagccaaatgccagactgattgtcatgctcagggaccctgtggagaggttgtactcagactatctctactttgcaagttcgaataaatccgcggacgacttccatgagaaagtgacagaagcactgcagctgtttgaaaattgcatgcttgattattcactgcgcgcctgcgtctacaacaacaccctcaacaacgccatgcctgtgaggctccaggttgggctctatgctgtgtaccttctggactggctcagcgtttttgacaagcaacagtttctcattcttcgcctggaagatcatgcatccaacgtcaagtacaccatgcacaaggtcttccagtttctgaacctagggcccttaagtgagaagcaggaggctttgatgaccaagagccccgcatccaatgcacggcgtcccgaggaccggaacctggggcccatgtggcccatcacacagaagattctgcgggatttctacaggcccttcaacgctaggctggcgcaggtcctcgcggatgaggcgtttgcgtggaagacgacgtgagagctgaattgttgctgcacgtgctgggcccgccaatgccgtcatcatcaggattttacaaatctctttgcggggaactgtttcactcatggtatggaaaaccccaggactctgccactctaggcacacatgaattataaccattttggaatttccttcgtgatgttcgagagctcagcaatggacccctcacagagctcctctatccgaggccattggagaccccagtttctcaagaattcagctctgctctgagcgtcctggagcttggggatgcagccagctggcctgcactgggtgtggagagaacacctagggaaggcagcctggccctgcccgcctccgccttctggagagcctctgggttctgagtcagcaagccagaggtcatgccacaggcctggctggaacttacacttcacgttccctttttttccccctagagatggggtctcgccgtgttgcacagactgtctgtattcaatggctatcttcacaggtgtgatcataccacattcacttctgaaacactcttgttgcgatcgctaacctcactgggacagagaaccgcagtctttcgagaatggaggctcttcattttttttttctcctttactccaaactcagccctccagtttcttcagatgtaaaccctgttaacgtcactgtttccaaaaggaaaaaaataagtcagtttttggcagcaccttcatctttctgacctcctcctattctgtccttgtggacttatgtttaacatagaaaatgaatgcgtttaaaacaaaaccactttctgcatttaaccagtcctggctctctctctgctgcctcttcatacgttttctcaagaacttcagtttataattggaagagaaatttttgctgttaatgccagaatgagcaacctcaaggaattgaacacttcttggaaaatctaggtaattcaagccctcatcaggtttacaagatcatcagagaaacagaggattttaatttttagttctggccggctacaggctccatttctctgccttcccattggaaatagtttatttccacattctccactgcgtgtggtcaaagttcctcacccagcaagggactatagatactcgtgtcccaattccaaaacacaatgcacaagctgaacttgggctgaacgtggcgtgttgagatttggaatgaggtttctaagagccgtgttcttcatggaattttccaggccacttggcagcttggtttaccgatggatgggctagagatcttgtcgtttcttggaagtcacagggaagattgaagagaacgcttgagcatccttggcaacagcccaggtgggacctggatgaagctttgcactcaagtattgtcaagggaagcttcctgtgaaccaaagttctcaggccaaggtctcgcccaccaaagccagaaagtgcaagcacccgtctacccagctctaacttgtatgtgtgagacagaccaggcttcgggggtaggaggatctgcagttgttcagccgtctttctgctggtgttgtctttctgccatcagagaagggacacacagcccgttcgaaggtgtgcagagggctctgagcgccaggatggccagggctgtttttgctactgaaggagcgtgtgtcctgaactcccacttgcagggacagtccccaccttctctatagccggcactgggagcagccgccagcagggaaatctggcctgagcacaaggatgctttagggagagatcacttcagtgtgtgtgtatatttatttgcagtacagtgcgcgcgtgtgtgtgtgtgtacgcgcacgtgtgggtgagtgcgtcttctgagtgggttctgttcagttgctaatgaggctcctccgctctggacacaacccttttatagattaatttctctgccaattaacttgtcattttcagtacatattttactattccacaccaaccataattacaacaagggatttttcttatgcactcctatgcatgtgaataacatgtggtgtaattctgcttcttacagaagtattactgaaggtattatttccaatattatttggtttattatgcggatcttttttatatatgcagtcccatcccttctgtgccactcaatgccatccagacatggtttttccctccaggggcctttctctccagagggcacttcggctgcctctgcttcctctcattcgaggcccggctcttgctgacagaataggttccgttctgggcggtggttctcgagcctgccattcaaaaccaaagcaaattggagcatttctcacaacatggtattgaagttcctttttgttctcaaaagttgtgaccgtgttaaattgtactcccttagtcctgtaaggtatgttaagtgaatcgcagttacgctgtacttttattaatatttaacataattaaagatggacccataagagtgacgcctgtggagcgcgtgctcttcctctgcagccaaaaaaaaaaaaaaaaaaaaaaaaaaaaaaaaaaa

SEQ ID NO: 703 - DNA, 358 bp, Homo sapiens
ctttttttaagatttcaaactgggttacacactggaaaaggctgggttaagggccgaaatttaataaatctgtactgataactaaaggctacagagatttcatatattttttttaacttttagaaatcagagtgcttataaaatggctggctcatggctctgtcacccagcacctctgacgccgcctcctagccttcgttggtgagataaccacggaatagtgattccatgcgtaaacaacaagaatactaaaccaataaaactagcttatcatgcaaatattaaggcatctagaaagtcagttaaaatatattgtcatagagacagaacatctatttcccagcggacttcatgtaac

SEQ ID NO: 704 - DNA, 219 bp, Homo sapiens
  modified_base (139)..(139): a, c, t or g
gtcgatgatatttcactgatggtagatcgcagcccctgcaacgtagcctttgttacatgaagtccgctgggaaatagatgttctgtctctatgacaatagtattttaactgactttctagaatgccttaatatttgcantgataagctagttttattgggtttagtattcttgttgtttacgcatggaatcactattcctggttatctcaccaacgaag

SEQ ID NO: 705 - DNA, 2424 bp, Homo sapiens
cctggaactctagcacgccgagtgaacttgaatctttggctatttaaggaggactgggtttgttgtgaagttgcggtgatccagcgcagagccccgtcctgattgatcgcatcgcggggctcagatgactgtaaaatgaatagatgaaattcttgcttctcgaagattttcttgggcatctcccggaaagtgcgttttaaggcgaagtcatgatgtattctcccatctgtctcactcaggatgaatttcacccattcatggaagcacttcttccacatgtccgtgcaattgcctatacttggttcaacctgcaggctcgaaaacgcaagtactttaaaaagcatgagaagcgaatgtcaaaggatgaagaaagagcagtcaaagatgagcttctcagtgaaaagcctgaaatcaaacagaagtgggcatccaggctccttgccaaactgcgcaaagatattcgccaggagtatcgagaggactttgtgctcaccgtgactggcaagaagcacccgtgctgtgtcttatccaatcccgaccagaagggtaagattaggagaatcgactgcctgcgacaggcagacaaagtctggcgtctggatctagtcatggtgatcctgttcaaaggcatccccttggaaagtaccgatggagagcggctcatgaaatccccacattgcacaaacccagcactttgtgtccagccacatcatatcacagtatcagttaaggagcttgatttgtttttggcatactacgtgcaggagcaagattctggacaatcaggaagtccaagccacaatgatcctgccaagaatcctccaggttaccttgaggatagttttgtaaaatctggagtcttcaatgtatcagaacttgtaagagtatccagaacgcccataacccagggaactggagtcaacttcccaattggagaaatcccaagccaaccatactatcatgacatgaactcgggggtcaatcttcagaggtctctgtcttctccaccaagcagcaaaagacccaaaactatatccatagaygaaaatatggaaccaagtcctacaggagacttttacccctctccaagttcaccagctgctggaagtcgaacatggcacgaaagagatcaagatatgtcttctccgactactatgaagaagcctgaaaagccattgttcagctctgcatctccacaggattcttccccaagactgagcactttcccccagcaccaccatcccggaatacctggagttgcacacagtgtcatctcaactcgaactccacctccaccttcaccgttgccatttccaacacaagctatccttcctccagccccatcgagctacttttctcatccaacaatcagatatcctccccacctgaatcctcaggatactctgaagaactatgtaccttcttatgacccatccagtccacaaaccagccagtcctggtacctgggctagcttggttcctttccaagtgtcaaataggacacccatcttaccggccaatgtccaaaattacggtttgaacataattggagaacctttccttcaagcagaaacaagcaactgagggaaaaagaaacacaacaatagtttaagaaattttttttttaaataaaaaaaaggaaaagaggaagactggacaaaacaacacaaaggcagaaaggaaagaaactgaagaaagaagataatagaccagcaattgcagcacttacaatcactaattcccttaaggttaaactgtaatgacataaaaagggtcgatgatatttcactgatggtagatcgcagcccctgcaacgtagcctttgttacatgaagtccgctgggaaatagatgttctgtctctatgacaatatattttaactgactttctagatgccttaatatttgcatgataagctagttttattggtttagtattcttgttgtttacgcatggaatcactattcctggttatctcaccaacgaaggctaggaggcggcgtcagagatgctgggtgacagagccatgagccagccattttataagcactctgatttctaaaagttaaaaaaaatatatgaaatctctgtagcctttagttatcagtacagatttattaaatttcggcccttaacccagccttttccagtgtgtaacccagtttgaaatcttaaaaaaagaaaaaatgaaaaaaaaaggaaaaaaagaaaaaaggaaaaaaacagtttgaacacaaaggctctatggaagaaatgcctctatgtaggtgaagtgttctctctgcatgcaacagtaaaaattaatataatattttccccacaaaagaaacacttaacagagggcaagtgcaatttattaaatttatattcttaaagggggaattcatggattattaaggtccttcaggcccttggggactctta

SEQ ID NO: 706 - DNA, 431 bp, Homo sapiens
  modified_base (331)..(331): a, c, t or g
  modified_base (353)..(353): a, c, t or g
  modified_base (358)..(358): a, c, t or g
  modified_base (383)..(383): a, c, t or g
  modified_base (410)..(410): a, c, t or g
  modified_base (424)..(424): a, c, t or g
  modified_base (431)..(431): a, c, t or g
ccaaatcaatttattatcctgacagctggcatcattaatactttaacaaaaccacttaaaattagccaaatatctaagacagatacatatacaaaagatatacaaattaaaaccatttaaaaagtaatagataccataatttgtacttggccacaacttctgtattcagaaatgattgtaaaattaaaacctaagttaaaaactgtacaccatatactttgagtgatttacatcttagaaaacaaaggcagtctttcattgttacagatttagtgtccctggtgggttgaggagagaaacaccatgatactttgaatttttggacttttcncctattgactgttgtgcatgcngtggngccttgaggtaggtccggtgaaggnccatgagacaaggcctaagactttccnggggtatatcccgnctttcgn

SEQ ID NO: 707 - DNA, 624 bp, Homo sapiens
  modified_base (239)..(239): a, c, t or g
  modified_base (483)..(483): a, c, t or g
ccagtgagtgttaatgaagtaccagactaccatgaggatattcacacataccttagggaaatggaggttaaatgtaacctaaagtgggttacatgaagaaacagccagacatcactaacagtatgagagctatcctcgtggactggttagttgaagtaggagaagaatataaactacagaatgagaccctgcatttggctgtgaactacattgataggttcctgtcttccatgtcagtnctgagaggaaaacttcagcttgtgggcactgctgctatgctgttagcctcaaagtttgaagaaatataccccccagaagtagcagagtttgtgtacattacagatgatacctacaccaagaaacaagttctgagaatggagcatctagttttgaaagtccttacttttgacttagctgctccaacagtaaatcagtttcttacccaatactttctgcatcagcagcctgcaaactgcaaagttngaaagtttagcaatgtttttgggagaattaagtttgatagatgctgacccatacctccagtatttgccatcagttattgctggagctgcctttcatttagcactctacacagtcacgggacaaagctggcctggaatcatg

SEQ ID NO: 708 - DNA, 1682 bp, Homo sapiens
cggcagccagcctattctttggccgggtcggtgcgagtggtcggctgggcagagtgcacgctgcttggcgccgcaggctgatcccgccgtccactcccgggagcagtgatgttgggcaactctgcgccggggcctgcgacccgcgaggcgggctcggcgctgctagcattgcagcagacggcgctccaagaggaccaggagaatatcaacccggaaaaggcagcgcccgtccaacaaccgcggacccgggccgcgctggcggtactgaagtccgggaacccgcggggtctagcgcagcagcagaggccgaagacgagacgggttgcaccccttaaggatcttcctgtaaatgatgagcatgtcaccgttcctccttggaaagcaaacagtaaacagcctgcgttcaccattcatgtggatgaagcagaaaaagaagctcagaagaagccagctgaatctcaaaaaatagagcgtgaagatgccctggcttttaattcagccattagtttacctggacccagaaaaccattggtccctcttgattatccaatggatggtagttttgagtcaccacatactatggacatgtcaattgtattagaagatgaaaagccagtgagtgttaatgaagtaccagactaccatgaggatattcacacataccttagggaaatggaggttaaatgtaaacctaaagtgggttacatgaagaaacagccagacatcactaacagtatgagagctatcctcgtggactggttagttgaagtaggagaagaatataaactacagaatgagaccctgcatttggctgtgaactacattgataggttcctgtcttccatgtcagtgctgagaggaaaacttcagcttgtgggcactgctgctatgctgttagcctcaaagtttgaagaaatataccccccagaagtagcagagtttgtgtacattacagatgatacctacaccaagaaacaagttctgagaatggagcatctagttttgaaagtccttacttttgacttagctgctccaacagtaaatcagtttcttacccaatactttctgcatcagcagcctgcaaactgcaaagttgaaagtttagcaatgtttttgggagaattaagtttgatagatgctgacccatacctcaagtatttgccatcagttattgctggagctgcctttcatttagcactctacacagtcacgggacaaagctggcctgaatcattaatacgaaagactggatataccctggaaagtcttaagccttgtctcatggaccttcaccagacctacctcaaagcaccacagcatgcacaacagtcaataagagaaaagtacaaaaattcaaagtatcatggtgtttctctcctcaacccaccagagacactaaatctgtaacaatgaaagactgcctttgttttctaagatgtaaatcactcaaagtatatggtgtacagtttttaacttaggttttaattttacaatcatttctgaatacagaagttgtggccaagtacaaattatggtatctattactttttaaatggttttaatttgtatatcttttgtatatgtatctgtcttagatatttggctaattttaagtggttttgttaaagtattaatgatgccagctgtcaggataataaattgatttggaaaacttaaaaaaa

SEQ ID NO: 709 - DNA, 456 bp, Homo sapiens
  modified_base (51)..(51): a, c, t or g
  modified_base (247)..(247): a, c, t or g
  modified_base (297)..(297): a, c, t or g
  modified_base (385)..(385): a, c, t or g
  modified_base (390)..(390): a, c, t or g
  modified_base (395)..(395): a, c, t or g
  modified_base (400)..(400): a, c, t or g
  modified_base (403)..(403): a, c, t or g
  modified_base (437)..(437): a, c, t or g
  modified_base (442)..(442): a, c, t or g
  modified_base (444)..(444): a, c, t or g
ttatttaactccatacaaaatgtgattaaaaacattaaataggtgatgttntattttgaagagcattaagtcagtttttaaaatgtagttgttttaccttggtcacctcagccattttttattctcctctgttacaagcatgtgctatacacagcaactttctggcttatatcctttaggagtgaacggacttctccttccagtcttgctaattcttgagctttatcttctaagtatctttgattgncttcatattttctttctaaatctttgagcagttgcagcttgctatttgcntgagctaaaagagtttttgcttcatttgtagcatttcggctttccttctggcatcagctgactcttcagtttttttgggcaattaaanttttnctacnttgtntanacttgtcatcaagttcaccatctaaagtcctctnaacancnttctgcactttg

SEQ ID NO: 710 - DNA, 532 bp, Homo sapiens
  modified_base (257)..(257): a, c, t or g
  modified_base (269)..(269): a, c, t or g
  modified_base (324)..(324): a, c, t or g
  modified_base (346)..(346): a, c, t or g
  modified_base (353)..(353): a, c, t or g
  modified_base (376)..(376): a, c, t or g
  modified_base (386)..(386): a, c, t or g
  modified_base (424)..(424): a, c, t or g
  modified_base (445)..(445): a, c, t or g
  modified_base (493)..(493): a, c, t or g
ggcacgagcaaattctagtagtactcaattgtctgcagttacttttttgtgtgtgtaggtctcatctcccctcaaaatcccagatagattataaactcttaaacaggaagttagtgtctcttggtgtgtaaccccaccatgctagtccatagtagatgaccagtaagtggttgaatgaatgaaccatctattcttttcacctctttttggggacatctttgcttttcacagaggatagtgctgatttggacagcatntgaatgcagttngctaattgaagtattgaaaatggagatgcctatgcaccccacatgcatgttacangaaccttgacagaagatatacngtgaacngagttgaaagcctttctcaagtnagaggttatncttcagcatagttgctgctgacattgccagagcttgangatggtgttagaagaagctanaagagcaagggtatctaaagacatggcatctaaaggggcttattttgnggtatctatcatgggagtaaaaagtatctctttaaccaa

SEQ ID NO: 711 - DNA, 5831 bp, Homo sapiens
gggacctggaagcgccccagccccgcagcgatcgcagattcggctttcaaacaaaagaggcgccccggggggtgggaccgggacctcacccggtcctcgcagagttgcggccgcccgccccttcagccccggctctccgtatgcgcatgagcagaggcgcctccctctgttcctcccaaggctaaactttctaattcccttctttgggctcgggggctcccggagcagggcgagagctcgcgtcgccggaaaggaagacgggaagaaagggcaggcggctcggcgggcgtcttctccactcctctgccgcgtccccgtggctgcagggagccggcatggggcttctccagttgctagctttcagtttcttagccctgtgcagagcccgagtgcgcgctcaggaacccgagttcagctacggctgcgcagaaggcagctgctatcccgccacgggcgaccttctcatcggccgagcacagaagctttcggtgacctcgacgtgcgggctgcacaagcccgaaccctactgtatcgtcagccacttgcaggaggacaaaaaatgcttcatatgcaattcccaagatccttatcatgagaccctgaatcctgacagccatctcattgaaaatgtggtcactacatttgctccaaaccgccttaagatttggtggcaatctgaaaatggtgtggaaaatgtaactatccaactggatttggaagcagaattccattttactcatctcataatgactttcaagacattccgtccagctgctatgctgatagaacgatcgtccgactttgggaaaacctggggtgtgtatagatacttcgcctatgactgtgaggcctcgtttccaggcatttcaactggccccatgaaaaaagtcgatgacataatttgtgattctcgatattctgacattgaaccctcaactgaaggagaggtgatatttcgtgctttagatcctgctttcaaaatagaagatccttatagcccaaggatacagaatttattaaaaattaccaacttgagaatcaagtttgtgaaactgcatactttgggagataaccttctggattccaggatggaaatcagagaaaagtattattatgcagtttatgatatggtggttcgaggaaattgcttctgctatggtcatgccagcgaatgtgcccctgtggatggattcaatgaagaagtggaaggaatggttcacggacactgcatgtgcaggcataacaccaagggcttaaactgtgaactctgcatggatttctaccatgatttaccttggagacctgctgaaggccgaaacagcaacgcctgtaaaaaatgtaactgcaatgaacattccatctcttgtcactttgacatggctgtttacctggccacggggaacgtcagcggaggcgtgtgtgatgactgtcagcacaacaccatggggcgcaactgtgagcagtgcaagccgttttactaccagcacccagagagggacatccgagatcctaatttctgtgaacgatgtacgtgtgacccagctggctctcaaaatgagggaatttgtgacagctatactgatttttctactggtctcattgctggccagtgtcggtgtaaattaaatgtggaaggagaacattgtgatgtttgcaaagaaggcttctatgatttaagcagtgaagatccatttggttgtaaatcttgtgcttgcaatcctctgggaacaattcctggagggaatccttgtgattccgagacaggtcactgctactgcaagcgtctggtgacaggacagcattgtgaccagtgcctgccagagcactggggcttaagcaatgatttggatggatgtcgaccatgtgactgtgaccttgggggagccttaaacaacagttgctttgcggagtcaggccagtgctcatgccggcctcacatgattggacgtcagtgcaacgaagtggaacctggttactactttgccaccctggatcactacctctatgaagcggaggaagccaacttggggcctggggttagcatagtggagcggcaatatatccaggaccggattccctcctggactggagccggcttcgtccgagtgcctgaaggggcttatttggagtttttcattgacaacataccatattccatggagtacgacatcctaattcgctacgagccacagctacccgaccactgggaaaaagctgtcatcacagtgcagcgacctggaaggattccaaccagcagccgatgtggtaataccatccccgatgatgacaaccaggtggtgtcattatcaccaggctcaagatatgtcgtccttcctcggccggtgtgctttgagaagggaacaaactacacggtgaggttggagctgcctcagtacacctcctctgatagcgacgtggagagcccctacacgctgatcgattctcttgttctcatgccatactgtaaatcactggacatcttcaccgtgggaggttcaggagatggggtggtcaccaacagtgcctgggaaacctttcagagataccgatgtctagagaacagcagaagcgttgtgaaaacaccgatgacagatgtttgcagaaacatcatctttagcatttctgccctgttacaccagacaggcctggcttgtgaatgcgaccctcagggttcgttaagttccgtgtgtgatcccaacggaggccagtgccagtgccggcccaacgtggttggaagaacctgcaacagatgtgcacctggaacttttggctttggccccagtggatgcaaaccttgtgagtgccatctgcaaggatctgtcaatgccttctgcaatcccgtcactggccagtgccactgtttccagggagtgtatgctcggcagtgtgatcggtgcttacctgggcactggggctttccaagttgccagccctgccagtgcaatggccacgccgatgactgcgacccagtgactggggagtgcttgaactgccaggactacaccatgggtcataactgtgaaaggtgcttggctggttactatggcgaccccatcattgggtcaggtgatcactgccgcccttgcccttgcccagatggtcccgacagtggacgccagtttgccaggagctgctaccaagatcctgttactttacagcttgcctgtgtttgtgatcctggatacattggttccagatgtgacgactgtgcctcaggatactttggcaatccatcagaagttggggggtcgtgtcagccttgccagtgtcacaacaacattgacacgacagacccagaagcctgtgacaaggagactgggaggtgtctcaagtgcctgtaccacacggaaggggaacactgtcagttctgccggtttggatactatggtgatgccctccggcaggactgtcgaaagtgtgtctgtaattacctgggcaccgtgcaagagcactgtaacggctctgactgccagtgcgacaaagccactggtcagtgcttgtgtcttcctaatgtgatcgggcagaactgtgaccgctgtgcgcccaatacctggcagctggccagtggcactggctgtgacccatgcaactgcaatgctgctcattccttcgggccatcttgcaatgagttcacggggcagtgccagtgcatgcctgggtttggaggccgcacctgcagcgagtgccaggaactcttctggggagaccccgacgtggagtgccgagcctgtgactgtgaccccaggggcattgagacgccacagtgtgaccagtccacgggccagtgtgtctgcgttgagggtgttgagggtccacgctgtgacaagtgcacgcgagggtactcgggggtcttccctgactgcacaccctgccaccagtgctttgctctctgggatgtgatcattgccgagctgaccaacaggacacacagattcctggagaaagccaaggccttgaagatcagtggtgtgatcgggccttaccgtgagactgtggactcggtggagaggaaagtcagcgagataaaagacatcctggcgcagagccccgcagcagagccactgaaaaacattgggaatctctttgaggaagcagagaaactgattaaagatgttacagaaatgatggctcaagtagaagtgaaattatctgacacaacttcccaaagcaacagcacagccaaagaactggattctctacagacagaagccgaaagcctagacaacactgtgaaagaacttgctgaacaactggaatttatcaaaaactcagatattcggggtgccttggatagcattaccaagtatttccagatgtctcttgaggcagaggagagggtgaatgcctccaccacagaacccaacagcactgtggagcagtcagccctcatgagagacagagtagaagacgtgatgatggagcgagaatcccagttcaaggaaaaacaagaggagcaggctcgcctccttgatgaactggcaggcaagctacaaagcctagacctttcagccgctgccgaaatgacctgtggaacacccccaggggcctcctgttccgagactgaatgtggcgggccaaactgcagaactgacgaaggagagaggaagtgtggggggcctggctgtggtggtctggttactgttgcacacaacgcctggcagaaagccatggacttggaccaagatgtcctgagtgccctggctgaagtggaacagctctccaagatggtctctgaagcaaaactgagggcagatgaggcaaaacaaagtgctgaagacattctgttgaagacaaatgctaccaaagaaaaaatggacaagagcaatgaggagctgagaaatctaatcaagcaaatcagaaactttttgacccaggatagtgctgatttggacagcattgaagcagttgctaatgaagtattgaaaatggagatgcctagcaccccacagcagttacagaacttgacagaagatatacgtgaacgagttgaaagcctttctcaagtagaggttattcttcagcatagtgctgctgacattgccagagctgagatgttgttagaagaagctaaaagagcaagcaaaagtgcaacagatgttaaagtcactgcagatatggtaaaggaagctctggaagaagcagaaaaggcccaggtcgcagcagagaaggcaattaaacaagcagatgaagacattcaaggaacccagaacctgttaacttcgattgagtctgaaacagcagcttctgaggaaaccttgttcaacgcgtcccagcgcatcagcgagttagagaggaatgtggaagaacttaagcggaaagctgcccaaaactccggggaggcagaatatattgaaaaagtagtatatactgtgaagcaaagtgcagaagatgttaagaagactttagatggtgaacttgatgaaaagtataaaaaagtagaaaatttaattgccaaaaaaactgaagagtcagctgatgccagaaggaaagccgaaatgctacaaaatgaagcaaaaactcttttagctcaagcaaatagcaagctgcaactgctcaaagatttagaaagaaaatatgaagacaatcaaagatacttagaagataaagctcaagaattagcaagactggaaggagaagtccgttcactcctaaaggatataagccagaaagttgctgtgtatagcacatgcttgtaacagaggagaataaaaaatggctgaggtgaacaaggtaaaacaactacattttaaaaactgacttaatgctcttcaaaataaaacatcacctatttaatgtttttaatcacattttgtatgagttaaataaagccc

SEQ ID NO: 712 - DNA, 463 bp, Homo sapiens
atcacaaaactaactttattatatttttcccagttcgatttttctgtcaaatatcttcactgtccctatgacttctggttcttattttcttgacacacacattgtcctcagccttctttggattttctgcacacctcttgacactccgcgttactctctgcacagattcgctctccaaagtgcttgctgcaggctggctttttgtctttcttgatctcaggcacatggagtctgaatttcctgcttctcctttccctttctgattctgcatgagaaccttcgcactcttctgccctccgctctcctctgccaccttaggctgggagctctcattctgtctagcagacctcaagcaccttttgttctcactggactttgtctctaggtatgggttttccgggctccatcatctggattctgaatggtccatctctggggaggtcttcatgggcttcttttcatt

SEQ ID NO: 713 - DNA, 478 bp, Homo sapiens
  modified_base (1)..(1): a, c, t or g
nttcggcaccagcaaagatggaagcgtcacgggaaccaagaggctgcgctgcatgccagcaccagaggaaattgtggaggagctgccagccagcaagaagcagagggttgctcccagggcaagaggcaaatcatccgaacccgtggtcatcatgaagagaagtttgaggacttctgcaaaaagaattgaacctgcggaagagctgaacagcaacgacatgaaaaccaacaaagaggaacacaaattacaagactcagtccctgaaaataagggaatatccctgcgctccagaccgccaaaataagactgaggcagaacagcaaataacttgaggtctttgtattagcagaaagaatagaaataaacagaatgaaaagaagcccatgaagacctccccagagatgggacattcagaatccagatgatggagcccggaaacccatacctagagacaaagtcagtgagaacaaaaggtgct

SEQ ID NO: 714 - DNA, 459 bp, Homo sapiens
  modified_base (415)..(415): a, c, t or g
  modified_base (421)..(421): a, c, t or g
  modified_base (452)..(452): a, c, t or g
tttttttttttctaattcaggagttcttttattgccagtgaccgagagatggctagagctcaaaattctctcagccccgaagaaggggatagatttctttttataccgtggtctaaatagggcagggggagcctagctgaagcaatttttacagaagcagaacacgcaaaaagttaaaaaaaattaatggttacagagatagttacagaaaaatacacagttccagggtgcaggggcttaaactatcacaaagagataaatgcaggggcttgggtaccatccactgagcacgtccccaggggctgctggtacagctttgcctcaatatcttatcagtaaggtgcattcctgggatgtgcttgggagtcagcttgcactagttattccctttaagggaggggggttaaggggactncaagtnaagaggctaaaatgggagttttttccagctntttcagc

SEQ ID NO: 715 - DNA, 511 bp, Homo sapiens
  modified_base (204)..(204): a, c, t or g
  modified_base (370)..(370): a, c, t or g
  modified_base (422)..(422): a, c, t or g
  modified_base (474)..(474): a, c, t or g
  modified_base (482)..(482): a, c, t or g
  modified_base (494)..(494): a, c, t or g
  modified_base (503)..(503): a, c, t or g
tttttttttttttttttcaaaataaaaaatgcaatttttatttgttgaacataatttgaaactgtaaaaagatttctctgtccatcaccagaaatccagaagacacctgaagaggactgactgtttctttgccacggggaaggtgtgatgaaacaattaaaatcccatgcatccctggcccttcctccacgttgcccctcagantgcctgcagctgcagcaggcaggtaggcagcaggagaacccgggctgtggaaggcccctctgcctctctgggaaagctgctggggaagccagaggtcacagtgcattgggaggcctgggctttcagccactggccagggccaaaatggaaacatctgcttcaagtntccccgggcaccttgctgggggtgagtggggagaaagaagtgggaggaaatntgatggctgggaccacaagtttttcaccctgttaccttgggtttttgaagtnggcccttnttggttacaggnagcagggtnagagtaaa

SEQ ID NO: 716 - DNA, 229 bp, Homo sapiens
  modified_base (115)..(116): a, c, t or g
  modified_base (221)..(221): a, c, t or g
tgcctttgaagtgagcaccagaggccttcctcctccagggccctctgcagaccaggctgagatggaggaacctgctaaaatcgatggagatgcttctagcctcccagtaggaggnnccagccatgccttcaacctggcaggaggtgtagccactcctcatcctccctgagtgctgatattctctctctctctttctcttcctcttctttctctctcttctnctctcttt

SEQ ID NO: 717 - DNA, 2280 bp, Homo sapiens
gagggcgcttccggcacagcggaactccgggtgccggttgaggttgctggtggacctgctctggtggtcttggatgaggccccatgagcgcggcgcccctggtgggctacagcagcagcggctccgaggatgagtccgaggacgggatgcggaccaggccgggggatgggagccaccgtcgtggccagagcccccttcccaggcagagatttccagtacctgacagtgtgctgaacatgttcccgggcaccgaggaggggcctgaagatgacagcacaaaacacgggggacgggtgcgcaccttcccccacgagcgaggcaactgggccacccacgtctatgtaccatatgaagccaaggaggagttcctggatctgcttgatgtgttgctgccccatgcccagacatatgtcccccggctggtaaggatgaaggtgttccacctcagcctgtcccagagtgtggttctgcgccaccactggatcctccccttcgtgcaggctctgaaagcccgtatgacctccttccacagattcttctttactgccaaccaggtaaagatttacaccaatcaagagaaaaccaggacctttattgggcttgaggtcacttcagggcatgcccagttcctggacctggtttcagaggtggacagagtcatggaggaattcaacctcaccactttctaccaggatccttctttccacctcagcctggcctggtgtgtgggtgatgcacgtctccagctggaggggcagtgcctgcaggaactacaggcaatcgtggatgggtttgaagatgctgaggtgctgctgcgcgtgcacactgagcaagtccgctgcaagtctgggaacaagttcttctcgatgcctttgaagtgagcaccagaggccttcctcctccagggccctctgcagaccaggctgagatggaggaacctgctaaaatcgatggagatgcttctagcctcccagtaggaggccccagccatgccttcaacctggcaggaggtgtagccactcctcatcctccctgagtgctgatattctctctctctctttctcttcctcttctttctctctcttctcctctctttctctcctctgtctctcttcctctcctctcttcctctcttctctcttcctctcctctctctcttcctcttctctctcttcccctcctgtctctcctcccctcctctcttcctctcctctctcttcctctcctctctctacccctcctgtctctcctcccctcctctctcttcctctcctctctctcttcctctcctctctcttcccttcctgtctctcttcccctcctctctctcttcctgtcctctatctcttcccctcctctatctcttcctctcctctctctcttcctctcctctctctctcttgctttcttctctctctcctgtctcggctgttgtgggttgcaggttgggtgctgctgttgtggtccttcccagaaactgccagtagagggcagcctgggcatcctaatgcttactctggttgttacacaaagaaaatattggggtcactggcgagcccacccacactcaccagaatctccactgtagtccccctaacaaacagcccttcacttcctctcccacttcagcaatttgtattttgatgccattggcctcagatcagagtgttttaaatcatcacgccctggcttatccctggtcgagccaggacacggggtgcttcagtgggtctgtcaccctctctccttgaagcatgttgcttttatttatttacttttactctcaccctgctcctgtaccagcaggggccacttcaaagccaaggtacagggtgataacttgtggtccagcatcagttttctccacttctttctcccactcacccccagcaaggtgcctggggagacttgagcagatgtttcattttggcctggccagtggctgaaagccaggcctccaatgcactgtgacctctggcttccccagcagctttcccagagaggcagaggggccttccacagcccgggttctcctgctgcctcctgcctgctgcagctgcaggcattctgaggggcaacgtggaggaagggccagggatgcatgggattttaattgtttcatcacaccttccccgtggcaaagaaacagtcagtcctcttcaggtgtcttctggatttctggtgatggacagagaaatctttttacagtttcaaattatgttcaacaaataaaaattgcattttttattttggaaaaaaaaaaaaaaaaaaaaaaaaaaa

SEQ ID NO: 718 - DNA, 371 bp, Homo sapiens
  modified_base (92)..(92): a, c, t or g
tttttttttagctgcaagatgaacgtttattagcacacctgggcgtgccacatggaacatgtatgcagacagggatccctgcccaggggctncacaatctacacaacacacgacacatacacgcaggacacagacacggggagcggggcgtcttcacgggaaacagatggtctggggagccacgagctggggtatcggcgtgctcaaggcttgtccttctggttgtctttgcgtgggagggagaggagcgcaggacgtaacccagggacagccttccagaaagcagcagtattccaggggggggattcacagggagaaagaaaacaccagaggggcgtttgttcccagggtacaggggaggggttggggga

SEQ ID NO: 719 - DNA, 436 bp, Homo sapiens
ttaaaactctgatttcaaaggatcagttgaatttatactttagttatgggtgttttgttactttttttttttttgtatcatgactcagtatggttcaatttcctagtaagaagtggggatttgtgtttttggagtcctcagctcacatgtcttgttcctccttcagcacaagctaggggagatcctaccaacactgataggtcagtcattgatggcaatttgaatgtgggtattactctgtgagccaccctgcttcgcttgtttgtaaggagaaatgcatctggttatgtgaatttcccgagagcagcagacatgggagggccagactttaaaaggcaacgcaaggcagattcgaagagctgttgccctcttcttaaaaaaggcttttgggagggctgtgtttacatggcatgccctaaaagcagtccagtctgtt

SEQ ID NO: 720 - DNA, 2285 bp, Homo sapiens
ccgggaggaagcggccgcgcggcagctgcggggcgtgggggtggtggtggcggcggcggtggtggcggcggcggcggcggcggcagctgaggccgaggaggcggtggctgtggcggacgcagcagcaccccagctagggatagggctccgccgcgcccccttgctggccccatggaggcggcagcggcggcggcggcggcggcagcggcagcggcagcggcgggcgggggctgtggctccgggccgccgccgctgctgctgagcgagggcgagcagcagtgctactccgagctcttcgcgcgctgtgccggcgccgcgggcgggggccccgggtctgggccccccgaggccgccagagtcgcccccggcacggccactgcggccgccggccccgtggctgacctgtttcgggcatcgcagctgcccgccgagacgctgcaccagatcacagaactgtgtggtgcaaagcgggttggttattttggtccaacacagttttacattgccctgaaattaattgctgcagcacaatctggcctcccggtacggatagagagtattaaatgtgaattgcctctgcctcgctttatgatgtcaaagaatgatggtgagatacgatttgggaacccagctgagctgcatggaactaaggttcagattccatatttaactacagaaaaaaattccttcaaaagaatggacgatgaggataaacagcaggaaacacagtctcccacgatgtcacccctcgcctcccctccttcttccccgcctcattaccagagggtgcccttgagccatggctacagcaaactgcggagcagcgcagaacagatgcatccagcaccttatgaagctaggcagccccttgtccagcccgagggatcctcatcagggggcccaggaaccaagccccttcggcatcaggcttcccttatccggtccttttcagtggagagggaactacaggataacagcagttaccccgacgaaccctggaggataacagaagaacagcgcgagtactatgtcaatcagttccgatcccttcagccagacccaagctctttcatttcaggttctgtggccaagaacttcttcaccaaatcaaagctttccattccagaactctcctatatatgggagcttagtgatgctgactgtgatggagccctgaccctgcctgagttctgtgctgcgtttcatctcattgtggctcggaagaacggctacccattgcctgagggcctccctccaactctgcagccagaatacctgcaggcagcttttcctaagcccaaatgggactgtcaattatttgattcttattctgagtcactgccggcaaatcaacaacctcgtgacttgaatcggatggagaagacatctgttaaagacatggctgaccttcctgtccctaaccaggatgtaactagtgatgacaaacaagctttgaaaagtactatcaatgaagccttaccaaaggacgtgtctgaggatccagcaactcccaaggattccaacagtctcaaagcaagaccaagatccagatcttactctagcacctccatagaagaggccatgaaaaggggcgaggaccctcccaccccgccacctcggccacagaaaacccattccagagcctcctccttggatctgaataaagtcttccagcccagtgtgccagctaccaagtcaggattgttacccccaccacctgcgctccctccaagaccttgtccatcacagtctgaacaagtgtcggaggccgagttactcccacagctgagcagagccccatcccaggctgcagaaagtagtccagcaaagaaggatgtactgtattctcagccaccatcaaagcccattcgtaggaaattcagaccagaaaaccaagctacagaaaaccaagagccttccactgctgcaagtgggccagcttctgcggcaaccatgaaaccgcatccaacagtccaaaagcagtcttccaaacagaagaaggccattcaaactgctatccgcaaaaataaagaggcaaacgcagtgctggctcggctgaacagtgagctccagcagcagctcaaggaggttcatcaagaacgaattgcattggaaaaccaattggaacaacttcgtccggtcactgtgttgtgacccccccatggttcaagtgacagtgggtgaccttgtctgccaagatctttcttttgaatgttttgaacccaactacttgtcatagatgtttgactgtgtcaaaagctgtgagcagcaaaatataatccata

SEQ ID NO: 721 - DNA, 468 bp, Homo sapiens
  modified_base (407)..(407): a, c, t or g
  modified_base (422)..(422): a, c, t or g
  modified_base (431)..(431): a, c, t or g
  modified_base (442)..(442): a, c, t or g
ttttttttttttttaacctacaactagctctcagttcaggcactgtctaaagccccaggtgggtttaggtggtctaggataccaactccccctcaacattttaccttaatccaacagtacagtaattagccgaaacttgcctggtttttcctactagactgtaagccctctagggacagggacagtgtcttattcatctctgtgttcttagtgcagagcctggcccgctgttggtgtttaataaagtgtgttgatctgaaatgccccagaccaaccaagattcccagacttggcttcttcccacactgggctggagtcctcccggagctcagggggaggtgagggccccagaaggtgcacttgccatcaggcttctccctgggtcccgggaggactgcagccagggnccgaggcaccttttntgggaggtnggtaagagggntgaggcagcttcacaacttttttgcc

SEQ ID NO: 722 - DNA, 404 bp, Homo sapiens
  modified_base (168)..(168): a, c, t or g
  modified_base (171)..(171): a, c, t or g
  modified_base (365)..(365): a, c, t or g
tcccgagcccgacctctgcagttgctgagcggcctcaacttcaagtccccttcggagaaagtagtctttcttttaaggccgccttggacccccaaggccgggaaggggatcctggggcagggaggcaagaggagctggagagggagctctggcgaggcccgggcaggnagnggctgaattcgaggtttctccacacctgccatgctctgacattcctgcttcaaacccagctcactgggttcagggaaggttaattctctggaactttacagtttgctaagggttttcagtgtcctccactatgaagcctaacgatgtatgagtagaaactaaaggcaggaggtcacatgggcaagcggaccggnaattgcgagcccaaggcccaaccccagggttccagttcc

SEQ ID NO: 723 - DNA, 2070 bp, Homo sapiens
gttcgatgctggtttagggtttcaggcgtggaggttccaaaatccgaggtttgatttcagcctgcccttgccagtgcctgggccgctgggagccgttattggctgccgttaaggaccgttacgtttcccgggtccttctggcactcctctggtggaccgcccccatcggccacacttgccctgctctccagtgattctgtagctcctggctccgtagtctcgcggacagctctctttcctggaagatgtttctggtgggcctgacagggggcattgcctcaggcaagagctcagtgatccaggtgttccagcagctgggctgtgcggtgattgacgtggacgtgatggcccggcacgtcgtgcagccaggataccctgcccaccggcgcatcgtagaggtcttcggcactgaggtcttgctggagaatggcgacataaatcgcaaggtcctgggggacctgatctttaaccagcctgaccggcggcagctgctcatcgccatcacccaccccgagattcgcaaggagatgatgaaggagacgttcaagtacttcctccggggataccgctacgtgattctggatatccccctgctgtttgagaccaagaagttgctcaagtacatgaagcacaccgtggtagtatactgcgaccgggacacacagctggcacggctgatgcggcggaacagcctgaaccgcaaggacgcagaggcccgcatcaatgcccagctgcccctgacagacaaggcccgcatggcccgccatgtcctagacaactcgggcgagtggagtgtcaccaaacgccaggtcatcctcttgcacactgagctggagcgctccctggagtacctgccgctgaggtttggggtcctcacagggctcgctgccattgccagcctcctctacctgctcacccactaccttctgccttacgcctagtggggcactcaaggcagggagccccaggcctccatctatctccttggaggctgaagccaggtaacacatcctgtttcctctcagccccctccacacacacacacacacacacacacacacacacacacacacacacggactctccgaatcagggctgggcctctgtgccaggccatcccgtctttggagtgtatcctatttgaggtcaagaaatagcctgctgtccttcccaccttccctgagcagcacctacagaacagcaaccgtgatggtgtgtgaaagcaacagtcagagactgctatacatttctgtgggtgggggtagggaatactggctctgtggccctcctcagagctgggaggccaagggttcactgggcttgaatcctctctaagcacctaccccattatggcctaaacctcctcagtggaccacgggaaatcatgttggaccaagggtttccatgttcaaacagtcaacaaggccctcccctaggttgagatatttttgatactgaaggcccaggccccccagtatggcttgctgccagcaagcagcaaggattctctcgtgggtaacgctgtagccaggcaggaccagcctcttctgggagacccctctccccacgtagggtttgtgtagtgctcccacatcctgcttattgcctgccacccctgcttctcgcctggacctcttggtattccgtgtacaccatccttgctgtttcttgcctctgtgccttcaacctgctgctcctggcctgggataccttttattttcttttatttcttcttccttttttttttttttttttttttttaacctacaactagctctcagttcaggcactgtctaaagccccaggctgggttaggtggtctaggataccaactccccctcaacattttaccttaatccaacagtacagtaattagccgaaacttgcctggtttttcctactagactgtaagccctctagggacagggacagtgtcttattcatctctgtgttcttagtgcagagcctggcccgctgttggtgtttaataaagtgtgttgatctgaaatgccccagaccaaaaaaaaaaaaaaaaaaaaaaaaaaaaaaaaaaaaaaaaaaaaaaaaaaa

SEQ ID NO: 724 - DNA, 467 bp, Homo sapiens
  modified_base (92)..(92): a, c, t or g
  modified_base (141)..(141): a, c, t or g
  modified_base (160)..(160): a, c, t or g
  modified_base (329)..(329): a, c, t or g
  modified_base (337)..(337): a, c, t or g
  modified_base (382)..(382): a, c, t or g
  modified_base (432)..(432): a, c, t or g
  modified_base (443)..(443): a, c, t or g
  modified_base (457)..(457): a, c, t or g
  modified_base (465)..(465): a, c, t or g
ttttttttttttttttttttcttttttttttttttttaacagacttttgtgctgtagtaagaatgtcttagaagttgtgtcttcgagttccncaaacaccggacagggctcccccagagctgcctcagcctttgatttggnccatattcagacacttccngtcttgcatacactctgaggatgggccgcttctagctgccgcccgtctccctcttgccttcttgtctctaaatcagtacactcccaagtcactccatctgctatactaggtagagtgggagagccaaagcattttgggagtccatgttaaagtgcctggggaaaagagnatgtaagnagcagtggggagtttatataattaggcgaattcttttctcagganttcagtgggaaatgtatttctgttgttattatttacaaaattgtgggccncagagggagcngttttttgggaaanaagttttnca

SEQ ID NO: 725 - DNA, 472 bp, Homo sapiens
  modified_base (362)..(362): a, c, t or g
  modified_base (407)..(407): a, c, t or g
  modified_base (413)..(413): a, c, t or g
  modified_base (444)..(444): a, c, t or g
  modified_base (459)..(459): a, c, t or g
  modified_base (467)..(467): a, c, t or g
ctgatataaatgaaatgtcctaccgaatacatcccaggacggagggagtggaaaaaaacacagatttaaagcctctgcagtgagaatctttttcagaggtccagcccccacaaagaattctagacaacagacttaaaacaaatggtcacttgagaagcagagccgtgtcaaagccaagaggtgtcagatatacacttgagatatctatcttagggatgagagaaaaatgtagcttctaagggtatccaaccaaatccccacttgttttattttagaatttctaataaggaaattccttcctctgtcgttcggatattatcaatagctctgggcttcctgtcttctaaaggaactttctgccntgatttcaagggaactctgggctgttttcgttaggaagggtcccntgtttntggatccagtaaggggaacattcaggcggantcttcaggatccccnttcacccntgggg

SEQ ID NO: 726 - DNA, 509 bp, Homo sapiens
  modified_base (497)..(497): a, c, t or g
ttttttttttttttaatgaaaaatcatttattatacaacaatcatagataatgctttttatctacaaagagaaatggcttctgcagcctccctgtctactccattcatgatactatgttcttaagatataattactttcaaaggaaaacaaagcgatatccatattttccaaacaaggaagcccccagacacatttatgaacgatatggaaatattggaaagaactcaaatggactcctagatacaaaaggctgttctgcccatcacagtaaacactgttttgccttaaaataaaaataataaaatatttctcaaatgcaggggtgaggactttaccccgtaacatgcctaagtggttcgatatataattttgatggcttgacaattgctatgtttaattccattcagttaacattccattttgttagtttaaaaaattgggggaattactaatagatatgctttacaggatttaagtattttcattcccatgggtnagagggaaattt

SEQ ID NO: 727 - DNA, 435 bp, Homo sapiens
  modified_base (400)..(400): a, c, t or g
  modified_base (406)..(406): a, c, t or g
  modified_base (417)..(417): a, c, t or g
ggtctcagtgcatagctacctgccactctggatgttttcctgggcttcatatctgtatggcaaggagggagctgtccttcagcagacaaagtcaagcagctttaagtacaaggcagcttgaaacctctctgatgaaagtgaaaaatgtgggtagcttatactttcaaactaatgccagtgactagagagaggtttcattcatgatgtgtatttccaatttggtcttcaattcaagagatgcttcataaaacacttatagccttaaaccattcaagggctaattaaaaaaatagttatgaaatcttagccacaaaaaataaatcagggtaaacatttttaacctgtcgtttaagtgttgttaacttcaaaaaacccaaaatggcttatttttaatgtgganttttcntaaaaccattngaaaatttaatatttccc

SEQ ID NO: 728 - DNA, 4038 bp, Homo sapiens
gtgcgtgggggtaaccggcgcgggcgccgagatagcgccgggcagagggacccggctaccctggacagcgcatcgccgcccgcccgggtccgcgccacagccgctgcggatcatggaacatctaaaggcctttgatgatgaaatcaatgcttttttggacaatatgtttggaccgcgagattctcgagtcagagggtggttcatgttggactcttaccttcctaccttttttcttactgtcatgtatctgctctcaatatggctgggtaacaagtatatgaagaacagacctgctctttctctcaggggtatcctcaccttgtataatcttggaatcacacttctatccgcgtacatgctggcagagctcattctctccacttgggaaggaggctacaacttacagtgtcaagatcttaccagcgcaggggaagctgacatccgggtagccaaggtgctttggtggtactatttctccaaatcagtagagttcctggacacaattttcttcgttttgcggaaaaaaacgagtcagattacttttcttcatgtatatcatcatgcttctatgtttaacatctggtggtgtgtcttgaactggataccttgtggacaaagtttctttggaccaacactgaacagttttatccacattcttatgtactcctactatggactttctgtgtttccatctatgcacaagtatctttggtggaagaaatatctcacacaggctcagctggtgcagttcgtgctcgccatcacgcacaccatgagcgccgtcgtgaaaccgtgtggcttccccttcggttgtctcatcttccagtcatcttatatgctaacgttagtcatcctcttcttaaatttttacgttcagacataccgaaaaaagccaatgaagaaagatatgcaagagccacctgcagggaaagaagtgaagaatggtttttccaaagcctacttcactgcagcaaatggagtgatgaacaagaaagcacaataaaaatgagtaacagaaaaagcacatatactagcctaacagattcgcttgttttaaagcaaagactgaattgaaggttacatgttttaggataaactaatttcttttgagttcataaatcatttgtacccagaatgtattaatatattgctattaggttaatctgttaactgaatgctttgatcagcattgaggtgatgctcacctccgaggacctcagaactggtgcagcttctctctccctccctcccacagactgaacctttcgccagaagctgtccttataacgccttatacgcatacacagccaggaaacgtggagcattgtttctcacagagagtctccaaataaaaagggttttgttcagattaaaatgtttacaacaaaatgttaattatattctaaatacagggtatgttctaatctatattaagcaataatgccggtgcataatcattccatttgttcctttagcaatcaaccccagaaaatattaaaatgggatcatacacagaagatagaaaaatctagcaaaacttctctttctgtaagccagagtcttgtctatcagattcccacaaccactcctgattctaaatttagtgatatggtaatgaaattggtatttattttaaatattagttattctaaggagaaaaaaatgcttctgcaagattttcataattcgggggctgtggataggattgttcctctgtttccctaatcattcatctgttcatgtctccctcttgtgccagtcagcctaggttatacagatgccatgctccacaccacgagcagtgtacaaatctggctgcccgtttactttctgagcaagcactggagtccactccgacctttttctttgaacatgcatgctgctggaatatgtataaatcagaactagcagaagtagcagagtgatgggagcaaaataggcactgaattcgtcaactcttttttgtgagcctacttgtgaatattacctcagatacctgttgtcactcttcacaggttatttaagtttttgaagctgggaggagaaagatggagtagcttggaaagattccagcactgagccgtgggccggtcatgagccacgataaaaaatgccagtttggcaaactcagcactcctgttccctgctcaggtatatgcgatctctactgagaagcaagcacaaaagtagacaaaagtattaatgagtatttcctttctccataagtgcaggactgttactcactactaaactctaccaagaatggaaacaaagaatattttctgaagatttttttgaagattaatttataccctataaaataaaacttgttagcttcgatgaagtcacttcatcttctctcctaccttatttttttaaataagtttttaggtcctgacactgacatcaaatacatgcacaccagaaaggcatttccaccaccgtccccactcattagcgtccagagtgcctttctctctcggctttttttcccccctgagctctagttttaaactttctcctgttaaaaaaattgtacttttatttcatgtaaactgcccctctgaggatttgggcatattttttggaaggtgcctaatgcttaggatagtctctagggtgatgcactgcacctgcttccttcccttcagtgcggccgacccatttctgttgaacagatgtctcctgtgtgatgcccctgactcttacatttatctttctaaatcattttctgaagctgacttgctctagggtgcttcatcaccacttccatcttgcatcaccttataactgttctgtcttgttctctcccagcaatttattttaaaacaagggctagcttcaagcatgactgttaatggctcctctgtgacaaaacacaagttggaccaaggagaaagccctttggagaaactggaccctagttcagtttagatctcaaatataggctgaaatctcttaccaaagtgcgttccagataaaaatgagacttagaagacagactggtctaatatgctcactggtcatcacattcagcttattcttacgtgccagtgaggccctaaggtctcagtgcatagcatacctgccactctggatgttttcctgggcttcatatctgtatggcaaggagggagctgtccttcagcagacaaagtcaagcagctttaagtacaaggcagcttgaaacctctctgatgaaagtgaaaaatgtgggtagcttatactttcaaactaatgccagtgactagagagaggtttcattcatgatgtgtatttccaatttggtcttcaattcaagagatgcttcataaaacacttatagccttaaaccattcaagggctaattaaaaaaatagttatgaaatcttagccacaaaaaataaatcaggtaaacattttaacctgtcgttaagtgttgtaacttcaaaaaaccaaaatgcttattttaatgtgatttttctaaaactattgaaaaattaatatttctataatctattaaaaaaaatggagaatgttttctctcaaatttcctctgacccatgggaatgaaaatacttaaatactgtaaagcatatctattaataattcccccaattttttaaactaacaaaatggaatgttaactgaatggaattaaacatagcaattgtcaagccatcaaaattatatatcgaaccacttaggcatgttacggggtaaagtcctcacccctgcatttgagaaatattttattatttttattttaaggcaaaacagtgtttactgtgatgggcagaacagccttttgtatctaggagtccatttgagttctttccaatatttccatatcgttcataaatgtgtctgggggcttccttgtttggaaaatatggatatcgctttgttttcctttgaaagtaattatatcttaagaacatagtatcatgaatggagtagacagggaggctgcagaagccatttttctttgtagataaaaagcattatctatgattgttgtataataaattgatttttacattaaaaaaaaaaaaaaaa

SEQ ID NO: 729 - DNA, 441 bp, Homo sapiens
  modified_base (59)..(59): a, c, t or g
  modified_base (288)..(288): a, c, t or g
  modified_base (349)..(349): a, c, t or g
  modified_base (427)..(427): a, c, t or g
ttttttttttttcaattttaactcactttattgtgtgtaaatatatatatatatatccncaagtgaatgatactgttctcaggtttttctatatccaaggtatactttcttatgttttgacattcgtttgattacaacatgcaatttacaacacctgggactacaacaggacattaaacacagttctatccagaggctactacttcttgggtaaggactagtttgggctcctgcactgaacaatggtgtgattattcgatttcacagacaacttcacaggcaacacgncaaagcctaaggcgtaggttttgggttaggcctgtgttctaaggaaatccacttccagatnaaaaacgtgggttcccccattattgttcttacacactaaaggcacgcctttaccatttgggcagagcaatggctggantggggaagtggaat

SEQ ID NO: 730 - DNA, 549 bp, Homo sapiens
  modified_base (5)..(5): a, c, t or g
tgatncgccagcttggcacgagggaactgtcaaatctgaccagagacgtccccatctttgtgtgtgccatggccttccccacggtcccatgtccactccacgtttttgagccccgctatcggcttatgataagaagatgcatggaaactggcaccaagcggtttggcatgtgtttatctgctgagcacgcggggctttcagagtatggatgcatgctggagattaaggacgtgagaacgtttcctgatggaagttctgttgtagacgcgattggcatcagtcggttccgagtgctaagccaccgccacagagatggctataacacagcggacattgaatatcttgaagatgaaaaggtggagggtccagagtatgaagaacttgccgctctccacgattctgtgcatcaacagtctgtttcctggttcgcgtctctccaggatcgcatgaaagaacaaattttaagtcattttggggtaatgccagacagagaacctgagcctcagagtaatcccagcggccctgcctggtcctggtggatcctggccg

SEQ ID NO: 731 - DNA, 2365 bp, Homo sapiens
agtggcagtctgtttttcttgctcctgatgataattcattattgctgctgcgggcggagttatatttgaccatgaagaactatgagcaagctctccaagatgccagtgcagcttgtcagaatgaacctctcttgattaagggacatcaagtaaaagctcaggctctttctggattgggaagaagtaaggaagtgttaaaggaatttctctactgccttgctctgaatcctgaatgtaactctgtgaagaaagaagcacagaaggtaatgtgtgaagtgctgttttcagctacagcaaatgtgcatgaaaatttaacatcttccatccaaagcagattaaaggctcagggtcacagccacatgaatgcccaggctctgctggaagaaggtgatgcagggagctcagagaattcatctgagaaatctgatatgcttggaaataccaattcttcagttttgtattttatactgggcctacacttcgaagaggataaaaaggcgttagaaagcatccttccaacagcacccagcgctggcttaaagagacagtttccggatgacgtggaggatgcacctgacctgaacgcccctggaaaaattcccaagaaagatctctcacctcaaaggagcccaaactctgagacagaagaaagtcaggggctctcgcttgatgtaactgactttgagtgtgccctctgcatgagattgctctttgaacctgtcactacgccctgtggacacacattttgcctaaaatgccttgagcgctgccttgaccacgccccacactgtcctttgtgcaaagacaaactttcggaattattggcaagcagaaactttaacataactgttctggccgaagaattaatatttcgatatttgccggatgaattgtctgataggaagagaatttatgatgaagaaatgtcagaactgtcaaatctgaccagagacgtccccatctttgtgtgtgccatggccttccccacggtcccatgtccactccacgtttttgagccccgctatcggcttatgataagaagatgcatggaaactggcaccaagcggtttggcatgtgtttatctgctgagcacgcggggctttcagagtatggatgcatgctggagattaaggacgtgagaacgtttcctgatggaagttctgttgtagacgcgattggcatcagtcggttccgagtgctaagccaccgccacagagatggctataacacagcggacattgaatatcttgaagatgaaaaggtggagggtccagagtatgaagaacttgccgctctccacgattctgtgcatcaacagtctgtttcctggttcgcgtctctccaggatcgcatgaaagaacaaattttaagtcattttggggtaatgccagacagagaacctgagcctcagagtaatcccagcggccctgcctggtcctggtggatcctggccgtgctgcccctggagcgcaaggctcagctggccatcctcggcatgacctcgctcaaagagcggctccttgccatccgacggatattagtcatcatcacgcgtaagatgaatagtcggcaagagctggctaatgccagggagagaaataattgatttttctctctgtcaaggtttctggcagcccttgtgcttttataaatgtcaggcatggacgaatagccgtccattcattgtgcttcatcaagtgcttgtggatgaggttccaaaatgggacgcttgccaaacattgagtcctcctcaaaaatgacaattctgtgtctggtgggatctgaccttgtgtgaggttagcctgaagtctgaatggagcccatagttggaaaacaacctaagaaaatctcttagaagcaggtgcttggggaatgcagttcactgacagcacaggaccctgcagatggtttacatgtggtttgggtttcacgagaaagaaggattcacttcccagtcagtatctggctctgccagatggtaaaggcgtgctttagtgtgtagacaatatgggggaaccacgtttttatctggaagtggatttcttagaacacaggctaaccgaaactacgcttaggctttgcgtgttgctgtgaagttgtctgtgaaatcgaataatcacaccattgttcagtgcaggagcccaaactagtccttacccaagaagtagtagcctctggatagaactgtgtttaatgtcctgttgtagtcccaggtgttgtaaattgcatgttgtaatcaaacgaatgtcaaaacataagaaagtataccttggatatagaaaaacctgagaacagtatcattcacttgaggatatatatatatatatatttacacacaataaagtgagttaaaattgtatatgc

SEQ ID NO: 732 - DNA, 444 bp, Homo sapiens
  modified_base (383)..(383): a, c, t or g
  modified_base (396)..(396): a, c, t or g
  modified_base (403)..(403): a, c, t or g
ttttttttttgaattgaaaatctattttattacagaaagatcagtttctaacaaatgaaaatgtatcacctgttccttaactgtgtaaataataattaaatttctttgaaactggaatctgcaggtacaggtattctttaatcattattggatcatctaaagtagaagctgtcctgaggaagaggaagcttttgatcttaatactagtatctatataaaatggtgtggatgaacaatcatctaaaatcaatctattttaaataggaatttcctcctgaaaagtttcttacttggctacctactacccacaaaggactgatatgggtacagtaccgggattgttcaactttaggcaaaggatctccaatggcattcttcttctncatcacatctgtncagattntggctaacagtaacaaggaaaaacaggacacctatggaaat

SEQ ID NO: 733 - DNA, 474 bp, Homo sapiens
  modified_base (372)..(372): a, c, t or g
ttcctacacagatgttgctgctcaggatggtgaagccatgctccggaaaatcttggcctctcagcagcctgaccgatgcaaacgagcccaggccttcatcagcacacagggccttaagccagatactgtggctgaactcgtggcagaagaggtgacacgggagctgcttacttcatcacagggaacaggacataagcagatgttcaacccaacagaggaaagccagacatttcttcagctgaccactctgtgtcaagaccgcacattggtaggcatgaagttgttggataagatttcctccgttccccatgggaacttgtcttgcaccacagagctcctgatcctgggcccattcatttgctttcaccctgnacgttgccacatgggaggggcatcattccgagttccttacaggccgcccacattgcttcacaggttaaccattgggctttggaaggttacaacgaggttgac

SEQ ID NO: 734 - DNA, 7752 bp, Homo sapiens
gatggctgcagaggaaggggtcgcgagtgctgcttccgccggcggtagctggggcaccgcggccatggggcgggttctaccgatgctgttggtgccagtccccgccgaggcgatggggcagctcggctcccgggcgcagctgcgcacacagccggaggctctggggagcctgacggctgcgggcagcctccaagtgctttctttgacgcctggcagccggggcgggggtcgctgctgcctggagggccccttctggcactttctatgggaggattctcgtaacagcagcacaccaactgaaaagcccaaactgctcgctcttggtgaaaattatgaactgcttatctatgaatttaatttgaaagatggaagatgtgatgcaaccattttgtatagctgtagtagggaggcattgcaaaagctcattgacgatcaagatatcagtatttccttattgtctttgagaatcctgtcatttcacaataacacatcattactgttcatcaacaaatgtgtcatcctacatattatatttcctgaaagagatgctgcaattagagtactcaactgtttcacacttcccttgcctgcacaggcagtggacatgattattgacacgcagctctgcagaggaattctttttgttttgagtagtttaggctggatctacatttttgatgttgtggatggtacatatgtagctcatgtggatttagcacttcacaaagaagacatgtgtaatgagcagcaacaggagccagccaagatttcttcatttacttcactgaaagtttctcaagacctcgatgttgcagtgattgtcagctcctccaactccgcagttgctcttaacttaaatttgtatttcaggcaacacccaggacacctactgtgtgaaagaatactagaagatcttcctattcaaggacctaagggcgtagatgaagatgatcctgttaactctgcctacaacatgaaactggccaagttttccttccaaattgataggtcttggaaagcccagctatcatcattgaatgaaacaataaagaactccaaactggaggtttcctgttgtgctccatggttccaggatattttgcatttggagtcacctgaatctggtaaccacagtacaagtgtgcagagctgggccttcattccacaggacataatgcatgggcaatataatgttctacagaaagatcatgccaagaccagtgatccaggaagatcatggaaaataatgcacatcagtgaacaagaggaacccatagagcttaaatgtgtgtctgtgacaggattcactgcactgtttacttgggaagtggaaaggatgggctataccattaccctctgggatttggagacccagggcatgcagtgttcttcccttggcacaaagtgtattcctgtagacagtagtggagaccagcagctgtgctttgttttgacagagaatggactctctctgattttgtttggtttgactcaagaagagtttttaaacagactcatgatccatggaagtgccagcactgtggacactctttgtcatctcaatggctggggaaggtgctcaattcccatacatgcactagaggccgggatagaaaatcgtcagctggacacagtaaatttctttttgaagagcaaggaaaatctttttaatccatcctcaaaatcttctgtatctgatcagtttgatcacttgtcatcccatttatatttaagaaatgtggaagagctgataccagcattggatttactttgctcggcaattagagaaagttattctgaaccccaaagcaaacacttttcagaacaattgcttaatcttacactgtctttccttaacaaccaaataaaggagcttttcattcacactgaagaactagatgaacatctgcaaaaaggagtgaacattttgactagctacattaatgaacttcgaaccttcatgataaagtttccttggaagctaacagatgctatagatgaatatgatgtacatgaaaatgtccccaaagtaaaggagagcaatatatggaagaaactcagctttgaggaagttattgccagcgccattttaaacaacaaaataccagaggcacagactttcttcaggattgatagtcattctgctcaaaaacttgaggagcttattggcataggcctaaatttggtctttgacaatttaaaaaagaacaatataaaggaagcctctgaacttttgaagaatatggggtttgatgtaaaaggccaattgctcaagatctgcttctatacaactaataaaaatatacgtgactttttggttgaaattttaaaagaaaaaaattatttttctgaaaaagagaaaagaactatagacttcgtgcatcaagttgagaagctttatttgggacatttccaagaaaatatgcaaatccagtcatttcccaggtactggataaaggaacaagattttttcaagcacaagtctgttttggactcattcctgaaatatgattgtaaagatgaatttaacaaacaggaccatagaattgtgttaaattgggctctgtggtgggatcaactaacacaagaatccatccttctccccaggataagtccagaagaatacaaatcatattcccctgaagccctctggagatacctcacagctcgccatgattggttaaacattatcttatggattggagaatttcaaacccagcatagttatgcttcacttcagcagaacaaatggccccttctgactgttgatgttattaaccagaatacttcctgtaacaactacatgaggaatgaaattttagataagctggccaggaatggggtttttttggcatctgaactggaagactttgaatgcttcctcctaagactgagccgtattggaggtgtaatacaggataccctccctgttcaaaactacaagaccaaagaaggttgggatttccattctcaattcattctctattgtttggagcacagtctgcagcatcttctttatgtctaccttgactgttacaaacttagtcctgaaaattgtccctttttggaaaaaaaagagttacatgaagcacacccttggtttgaatttttagttcagtgtcgacaagttgccagtaacttaacagatcccaaactgatcttccaggctagccttgcaaatgctcagattttgattcccaccaatcaggccagtgtaagcagtatgctattggaaggacataccctcctggcccttgctactacaatgtattctcctgggggtgtcagtcaggttgttcagaatgaagaaaatgaaaactgtttgaagaaagtggatccccagctattgaagatggcattaactccttaccccaagctaaaaactgctctcttcccacagtgcactcctcctagtgtcctgccatctgatattacaatctaccaccttattcagtcattatcaccctttgatcctagcagattgtttggctggcagtctgctaacacactagctataggagatgcatggagtcatctcccacatttctctagccctgacctggttaataaatatgctatagtggaacgtctgaattttgcttattatttacataatgggcggccatcatttgcatttggtacttttctggtccaggaattaatcaagagcaagactcccaagcagctgatccagcaagtaggcaatgaagcctatgttatagggctctcctccttccacataccttcaataggagctgcatgtgtttgtttcttagaattgcttggccttgacagcctcaagctcagagttgatatgaaagtggccaatataattttgagctacaagtgcagaaatgaagatgctcagtacagctttatcagagagtctgtagccgaaaaactatctaaactagctgatggtgaaaagacaaccacagaagaattgcttgttctcttagaagaaggtacatggaacagcattcagcaacaggaaataaagaggttatccagtgaatctagcagccaatgggcattagtggtgcagttctgcaggctacacaatatgaaactaagcatatcttaccttagagaatgtgccaaagcaaatgattggctgcagttcattattcacagccaactccacaactaccacccagcagaggtgaaatcccttatccagtacttcagcccagtcattcaagaccacttaaggctggcttttgagaacttgccctcagtgcccacctccaaaatggacagcgatcaagtctgcaataagtgcccccaggaacttcaaggaagcaaacaagagatgaccgatttatttgaaattctgctccaatgctcagaggagccagactcctggcactggcttctggttgaagcagtgaaacaacaggcccctatcctcagtgttctggcctcatgtctccagggtgccagtgccatttcttgtctctgtgtttggatcatcacttctgtggaggacaatgttgcaactgaagcaatgggacacattcaggactcaacagaggaccatacctggaaccttgaggatctttcagtcatctggagaacattattaacaagacaaaagagcaaaactctcatcagaggtttccagcttttctttaaggattccccgttactactggtgatggagatgtatgaactgtgtatgttcttcaggaattataaagaagctgaagctaaacttctggagtttcagaagagccttgaaacgcttaacacagcagccacaaaggtccaccctgtcatccctgccatgtggctggaggatcaggtgtgtttccttttgaagcttatgctacagcagtgtaagacccagtatgagctggggaagcttttacagctctttgttgaaagagagcatctcttctctgatggtccagatgtgaaaaagctttgcatcctttgccagattttgaaggatacatccatagccattaatcatacaattattaccagctacagcattgagaatcttcagcatgaatgtagatctattttggaaagactgcagacagatggacaattcgctttggccaggagggtagcagaattagctgagttacctgtggacaacttggttattaaagagataacacaggaaatgcagaccctaaaacacattgaacagtggtcactaaaacaagcaagaattgacttctggaaaaaatgccatgagaattttaagaaaaattcaatttcaagcaaagcagcttcttcctttttctcaacccaggcccatgtggcatgtgagcacccaactggatggagcagcatggaggagcgccatctgctgctcaccttggcagggcactggcttgcccaggaggacgtggtgcccttggataagctggaggagctggagaagcagatctggctgtgccgcatcacccagcacactcttggaagaaatcaggaggaaacagagcccagattttctcgacagatctcaactagtggtgaactttcctttgatagtttagccagtgagttttccttctccaagttggctgctctgaacacatcaaaatacttagaacttaacagccttccatccaaagagacatgcgagaatagattggattggaaagagcaggagtcactaaactttttgattgggcgcctactggatgatggctgtgtgcatgaagcaagtagagtatgccggtattttcatttttataatccagatgtcgccttggtattgcactgcagagcactggcctcaggggaagctagtatggaggatctgcacccagagatccatgctctcctacaaagtgctgagctgcttgaggaagaagcacccgacattcccctaaggagagtccacagcacttcaagtctggatagtcagaagtttgtgacagtgccctccagtaatgaagtggtaactaacctggaagtgctgacaagcaaatgcctccatgggaagaactactgtcgacaggtcctctgtctgtatgatcttgccaaggagttgggctgttcctacacagatgttgctgctcaggatggtgaagccatgctccggaaaatcttggcctctcagcagcctgaccgatgcaaacgagcccaggccttcatcagcacacagggccttaagccagatactgtggctgaactcgtggcagaagaggtgacacgggagctgcttacttcatcacagggaacaggacataagcagatgttcaacccaacagaggaaagccagacatttcttcagctgaccactctgtgtcaagaccgcacattggtaggcatgaagttgttggataagatttcctccgttccccatggggaactgtcttgcaccacagagctcctgatcctggcccatcattgcttcaccctgacgtgccacatggagggcatcatccgagtcctacaggccgcccacatgctcacagataaccacctggcccccagtgaggagtatgggctggtggtacggctcctcactggcattggaaggtacaacgagatgacatacatatttgatttgctgcataaaaagcactactttgaagtgctaatgaggaagaagttggatccgagtggtaccctgaaaacagccctgctggactacatcaaacgctgccgtcctggagacagtgaaaagcacaatatgattgccctgtgcttcagcatgtgccgggagattggcgagaaccacgaggcagctgcccgcatccaactgaaattgattgagtctcagccctgggaggacagcctcaaggatgggcaccagctgaaacaactgctgctgaaggccctgactctgatgttggatgcagcagagagttatgccaaggactcctgtgtgcgacaggcccagcactgtcagcggctcaccaagttgataactctgcagattcactttctgaacactggccagaacacaatgctcatcaacttgggccgccacaagctgatggactgtattctggccctacctcggttctaccaggcttctattgtggctgaggcctacgattttgttccagattgggctgaaattttataccagcaagtgattcttaaaggagactttaattacttggaagaatttaagcagcaaaggttattaaagtccagtatatttgaagagatttccaaaaaatataaacaacatcagcctactgacatggtcatggaaaacctgaagaaattactcacatattgtgaagatgtttacctgtattacaagttggcatacgaacacaagttttatgaaattgtaaatgtgcttctgaaggaccctcagacaggttgctgtctaaaggacatgctagcaggttagatgatttcataggtgtctgttttcttgtactgttagcagattctgacagatgtgatgagaagaagaatgcattggagatctttgctaaagttgaacaatcccggtactgtaccatatcagtcctttgtgggtagtaggtagcaagtaagaaacttttcaggaggaaattcctatttaaaatagattgattttagatgattgttcatccacaccattttatatagatactagtattaagatcaaaagcttcctcttcctcaggacagcttctactttagatgatccaataatgattaaagaatacctgtacctgcagattccagtttcaaagaaatttaattattatttacacagttaaggaacaggtgatacattttcatttgttagaaactgatctttctgtaataaaatagattttc

SEQ ID NO: 735 - DNA, 426 bp, Homo sapiens
  modified_base (191)..(191): a, c, t or g
  modified_base (237)..(237): a, c, t or g
  modified_base (404)..(404): a, c, t or g
ttttttttgcttcacaaatgtcaattttattgacactagtgcacaactaaatacaataattgcaaaggaagtggaacgtgttcaaacagaaatggtgacaatgagttagaactgcagttgtttcaaggtactacactattatttaaaaaaaaaaatcacaaaaagaaaaatgttatcactacaagtagganttagaagagagaaattctggcagtctgtctagaggttaaaccattncatgcatttgtgagttgctgttggagagttgtttttgtatttgtccaccgtaatctgggcaacatccggggcttaccttcagctctcgcactgtgcgtgagatcgggtgagggcagttataagtgagaggcatgctgggacaccttggacttttggcagttgacgtngggaacaggaaaaaggcatttc

SEQ ID NO: 736 - DNA, 510 bp, Homo sapiens
  modified_base (68)..(68): a, c, t or g
  modified_base (102)..(102): a, c, t or g
  modified_base (122)..(122): a, c, t or g
  modified_base (404)..(404): a, c, t or g
  modified_base (425)..(425): a, c, t or g
  modified_base (445)..(445): a, c, t or g
  modified_base (463)..(463): a, c, t or g
  modified_base (470)..(470): a, c, t or g
acaccctggctcaaagtaaaaagagaattttaattactcatcaagctgccaaattctactaattgccnccttgtcagcatatttcattaattgctgaaaggnaaatgagttacatattttgnttggaccacgtcacctgtacattttcaaagcctcggattgtttatcttgcaaggagagaaggggcctcttctccacagatgcagctcaaattagcaaaactgaactgtagagtttcaggcctttcccttccttaaaatgctgatagatttctagaccagactttgatatttattggcttcttgggtcttgctgtttaaacacacccattgccctttctttcttagggccctgtaaggcaaagctgggagtaggcgtctttggggaaaagggcccaacttganccaccctaatttttgttcgtngccaagtcttgcaggagggnaacatgtttaggtaggtngttaacncgacaactttaggggttccctgttgtggaaatggcaggca

SEQ ID NO: 737 - DNA, 5028 bp, Homo sapiens
gcggccgctgcccgctttgcgccgctcctccctgcgcgagtagcgctggccccggcgtcgaggcggccatggcgacccggagcccgctccccacccaccccgcctgctccgccctcccctccgccccgcgccacctttgatggctcggacctcagccggccaccgccagccctgctcgcgcgcccgcgccgccgccgcccgcgggtattaatagccggcgccgccgcgccctcggccgccgggggcttgggagccgccgatcccggagcccgagccgggagagggagccgccgcagccgccggcgctgtggagatattctctaagccgctttcatcatgggagaaatagagcagaggccgaccccaggatcacgactgggggccccggaaaattcggggatcagtaccttggaacgtggacagaagccgcccccaacaccttcaggaaaactcgtgtccatcaaaatccagatgctggatgacacccaggaggcatttgaagttccacaaagagctcctgggaaggtgctgctggatgcagtttgcaaccacctcaacctcgtggaaggtgactattttggcctcgagtttcctgatcacaaaaagatcacggtgtggctggatctcctaaaacccattgtgaaacagattagaaggccaaagcacgttgttgttaagtttgtggtgaaattctttccgcctgaccacacacaactccaagaagaactcacaaggtacctgttcgcgctgcaggtgaagcaggacttggctcaaggcaggttgacgtgtaatgacaccagcgcagctctcttgatttcacacattgtgcaatctgagattggggattttgatgaagccttggacagagagcacttagcaaaaaataaatacatacctcagcaagacgcactagaggacaaaatcgtggaatttcaccataaccacattggacaaacaccagcagaatcagatttccagctcctagagattgcccgtcggctagagatgtatggaatccggttgcacccggccaaggacagggaaggcacgaagatcaatctggccgttgccaacacgggaattctagtgtttcagggtttcactaagatcaatgccttcaactgggccaaggtgcggaagctgagcttcaagaggaagcgctttctcatcaagctccggccagatgccaatagtgcgtaccaggataccttggaattcctgatggccagtcgggatttctgcaagtccttctggaaaatctgtgttgaacatcatgccttctttagactttttgaagagcccaaaccaaagcccaagcccgtcctctttagccgggggtcatcatttcggttcagtggtcggactcagaagcaggttctcgactatgttaaagaaggaggacataagaaggtgcagtttgaaaggaagcacagcaagattcattctatccggagccttgcttcacagcctacagaactgaattcggaagtgctggagcagtctcagcagagcaccagccttacatttggagaaggtgccgaatctccagggggccagagctgccggcgaggaaaggaaccgaaggtttccgccggggagccggggtcgcacccgagccctgcgccgaggagaagccccgcgggtaacaagcaggcggacggagccgcctcggcgcccacggaggaagaggaggaggtcgttaaggataggacccagcagagtaaacctcagcccccgcagccaagcacaggctccctgactggcagtcctcacctttccgagctgtctgtgaactcgcaggggggagtggcccctgccaacgtgaccttgtctcccaacctgagccccgacaccaagcaggcctctcccttgatcagcccgctgctgaatgaccaggcctgcccccggacggacgatgaggatgagggccggaggaagagattcccaactgataaagcgtacttcatagctaaggaagtgtctaccaccgagcgaacatatctgaaggatctcgaagttatcacttcgtggtttcagagcacagtgagcaaagaggacgccatgccggaagcactgaaaagtctcatattcccgaattttgaacctttgcacaaatttcatactaattttctcaaggaaattgagcaacgacttgccctgtgggaaggccgctcaaatgcccaaatcagagattaccaaagaatcggcgatgtcatgctgaagaacattcagggcatgaagcacctggcggctcacctgtggaagcacagcgaggccttggaggccctggagaatggaatcaagagctcccggcggctggagaacttctgcagagactttgagctgcagaaggtgtgttacctaccgctcaacaccttcctcctgcggccactgcaccggctcatgcactacaagcaggtcctggagcggctgtgcaaacaccacccgccgagccacgccgacttcagggactgccgagccgctttggcagagatcacggagatggtggcacagctccacggtacgatgatcaagatggagaatttccagaagctgcacgaactcaagaaagatttgattggcattgacaatcttgtggttccgggaagggagttcatccgtctgggcagcctcagcaagctctcggggaaggggctccagcagcgcatgttcttcctgttcaacgacgtcctgctatacacgagccgggggctgacggcctccaatcagtttaaagtccacgggcagctcccgctctatggcatgacgattgaggagagcgaagacgagtggggggtgccccactgcctgaccctccggggccagcggcagtccatcatcgtggccgccagttctcggtccgagatggagaagtgggttgaggacatccagatggccattgacctggcggagaagagcagcagccccgcccctgagttcctggccagcagcccccctgacaacaagtcccctgatgaagccaccgcggctgaccaggagtcagaggatgacctgagcgcctcgcgcacatcgctggagcgccaggccccgcaccgcggcaacacaatggtgcacgtgtgctggcaccgcaacaccagcgtctccatggtggacttcagcatcgcagtggagaatcagttgtctggaaacctgctgaggaaattcaaaaacagcaacgggtggcagaagctgtgggtggtgttcacaaacttctgcctgttcttctacaaatcacaccaggacaatcatccccttgccagcctgcctctgctcggctactcgctcaccatcccctctgagtccgagaacatccagaaagactacgtgttcaagctgcacttcaagtcccacgtctactacttcagggcggaaagcgagtacacgttcgaaaggtggatggaagtgatccgcagtgccaccagctctgcctcgcgaccccacgtgttgagtcacaaagagtctcttgtgtattgatggccggacacactcgtttccgcagtggctgctttcctggaagacgtttcctttcttctgtattaatgaagcctggtaaaattaacacctgtctgaaaatcaaaaacatggcttcccagcagctctcctgtctccacagccgcgttttttaaccccgacctctcagcgtctgaatgaacagcgctcccacctccagtcctggcatccgctgggggcgctgttctttagctagtgccagtattaaaacattgtcattacgagagtgccaaatgacatcttccctccaccctgcccctgaaaaacagtacacacacatccgttcaacacaagacagggcaagtgtttttcttcctaaaaaaagttctttcttttattattttcacctattggctgctgcattttacgaagtggacttcccggtgtttgtttgtttgtttgcaatacactcagtgcagccttaagcaaatgagatcattttcagatttcattttttttttcagtctttctacttttgtaataataggaagttagtaggactcacttctctgattaataagcaatttgcagcacacagcgttccactgcggggtttcacgctcacctgaaaacacctgttcccaacctacttcttggtgcaagttgaccaaatcgttttaagtggtaactctttccaaccgtagcagggttgttttctgttaagcaaagccgagatccagtgcaatacctggactgtcaccgtcctgtgagtggtgtacacaatgggaagataataagccgtggtgttttgctgtctgtctgtgtcacaagcatgaaaacccgtgtgtcattgatcagcaccatttgtggtatgttccgtgatgagcgtttagtgagcctgctggctgcagagcactatgaaatcatggtacgtagtccccggcacctgtcgttattcctatatcctcctgcaactgtggtttgaaactgcgcattctctagtagtatatatcgtgcctgtcttcaaaaacatttccctttttatactcattccccccaggcatggggtagtgtcagtcggactgcacagggaacacggtttccagtggctttggcccctactcgggaaacgtctgcctgttctcgatggtgatggggtggctgccattcccttggttttcctaagccctttctaacgagagtctcaaacaagcggaggcgagggccaattcaaccccattctttccagcgccccgcaccatagcacctgcccacctgagaaccaggaacgcaccctctctgtggagctctgactggtgtagctggaaacaaacagcaacttgcaaacggacgaagagcctgccgtgtgttaatcatttgccttacaagatgtaccagacggtttccagtactaacaaagggaataaaaatacctcacgccacaatccagcatattgatgttttaaggcaaaacaaaaaaaaaaaaaaaaaaaaaaaaaaaaaaaaaaaaaaaaaaaaaaaaaaaaaaaaaaaaaaaaaaaaaaaaaaaaaaaaaaaaaaaaaaaaaaaaaaaaaaaa

SEQ ID NO: 738 - DNA, 453 bp, Homo sapiens
  modified_base (237)..(237): a, c, t or g
  modified_base (387)..(387): a, c, t or g
  modified_base (438)..(438): a, c, t or g
ttttttttcccaacatgtaactctctcagtcttgtcagaacacaacttctgctatggaggaaatatttccatcaggaaagggccaagttagtgtcttaacttgactgccttgaatggggactctggaccccaggaagaatgtatttaggctcctcacaaaaaagagtgatggctgggcaaaacaaatgtactgcaagacccatcttccctccagttaatacactcccagggatgggnctgcagagggggagactctgagagaagctggaggcccacaaaagtccactgaccctctttctgtcccagaaatgaataaaggacccagttgtgctttccttccaaaatcctcaacaaagttgtttgtgctccaaggaaaatgtggggganttaaaaaaatcatgttcccgggtcatctttgtgtgtgttgcgggggaggtnggtggggagggaaaa

SEQ ID NO: 739 - DNA, 467 bp, Homo sapiens
  modified_base (428)..(428): a, c, t or g
  modified_base (462)..(462): a, c, t or g
agtactacaagcatcattctctcaaggaagggttcagaaccttagatacaactctgcagtttccatacaaggagccagaacattcagctggacagaggggtaatagagcaggcaacagcttgttaagtccaaaagtgctgggcattgcatcgctcggtatgacttctgtgcaagagatatgagagagttgtccttgttgaaaggagatgtggtgaagatttacacaaagatgagtgcaaatggctggtggagaggagaagtaaatggcagggtgggctggtttccatccacatatgtgggaaggaggatgaataaattcaaatcccgtgttgcaccctgcaccaaaattttcagaggaaggggataattaggaagcctgcacagcttcgtggatttaacttgaagtgtttttaaaaagctggcttttntgggctgtttcaacatcctccctccttaggcccntccta

SEQ ID NO: 740 - DNA, 4768 bp, Homo sapiens
atccttgccgcccgccccggcccagccgcgtcccggagccgtcgggcatggagccgtggaagcagtgcgcgcagtggctcatccattgcaaggtgctgcccaccaaccaccgggtgacctgggactcggctcaggtgttcgaccttgcgcagaccctccgcgatggagtcctgctctgccagctgcttaacaacctccgggcgcactccatcaacctgaaggagatcaacctgaggccgcagatgtcccagtttctctgtttgaagaacataaggacatttctcacggcctgttgtgagacgtttggaatgaggaaaagtgaacttttcgaggcatttgacttgtttgatgttcgtgactttggaaaggttatagaaacattatcacgactttctcgaacacctatagcattggccacaggaatcaggcccttcccaacagaagaaagcattaatgatgaagacatctacaaaggccttcctgatttaatagatgaaacccttgtggaagatgaagaagatctctatgactgtgtttatggggaagatgaaggtggagaagtctatgaggacttaatgaaggcagaggaagcacatcagcccaaatgtccagaaaatgatatacgaagttgttgtctagcagaaattaagcagacagaagaaaaatatacagaaactttggagtcaatagaaaagtatttcatggcaccactaaaaagatttctgacagcagcagaatttgattcagtattcatcaacattcctgaacttgtaaaacttcatcggaacctaatgcaagagattcatgattccattgtaaataaaaatgaccagaacttgtaccaagtttttattaactacaaggaaagattggttatttacgggcagtactgcagtggagtggagtcagccatctctagtttagactacatttctaagtcaaaagaagatgtcaaactgaaattagaggaatgttccaaaagagcaaataatgggaaatttactcttcgagacttgcttgtggttcctatgcaacgtgttttaaagtaccaccttctcctccaggaactggtcaaacataccactgatccgactgagaaggcaaatctgaaactggctcttgatgccatgaaggacttggcacaatatgtgaatgaagtgaaaagagataatgagacccttcgtgaaattaaacagtttcagctatctatagagaatttgaaccaaccagttttgctttttggacgacctcagggagatggtgaaattcgaataaccactctagacaagcataccaaacaagaaaggcatatcttcttatttgatttggcagtgatcgtatgtaagagaaaaggtgataactatgaaatgaaggaaataatagatcttcagcagtacaagatagccaataatcctacaaccgataaagaaaacaaaaagtggtcttatggcttctacctcatccatacccaaggacaaaatgggttagaattttattgcaaaacaaaagatttaaagaagaaatggctagaacagtttgaaatggctttgtctaacataagaccagactatgcagactccaatttccacgacttcaagatgcataccttcactcgagtcacatcctgcaaagtctgccagatgctcctgaggggaacattttatcaaggctatttatgttttaagtgtggagcgagagcacacaaagaatgtttgggaagagtagacaattgtggcagagttaattctggtgaacaagggacactcaaactaccagagaaacggaccaatggactgcgaagaactcctaaacaggtggatccaggtttaccaaagatgcaggtcattaggaactattctggaacaccacccccagctctgcatgaaggaccccctttacagctccaggccggggataccgttgaacttctgaaaggagatgcacacagtctgttttggcagggcagaaatttagcatctggagaggttggattttttccaagtgatgcagtcaagccttgcccatgtgtgcccaaaccagtagattattcttgccaaccctggtatgctggagcaatggaaagattgcaagcagagaccgaacttattaatagggtaaatagtacttaccttgtgaggcacaggaccaaagagtcaggagaatatgcaattagcattaagtacaataatgaagcaaagcacatcaagattttaacaagagatggcttttttcacattgcagaaaatagaaaatttaaaagtttaatggaacttgtggagtactacaagcatcattctctcaaggaagggttcagaaccttagatacaactctgcagtttccatacaaggagccagaacattcagctggacagaggggtaatagagcaggcaacagcttgttaagtccaaaagtgctgggcattgccatcgctcggtatgacttctgtgcaagagatatgagagagttgtccttgttgaaaggagatgtggtgaagatttacacaaagatgagtgcaaatggctggtggagaggagaagtaaatggcagggtgggctggtttccatccacatatgtggaagaggatgaataaattcaaatcccgtgttgcaccctgcaccaaaaatttcagagaagggataaatagaagcctgcacagcatcgtgaattaactgaagtgtttaaaaagctgcatttctggctgttcaacatcctccctccttagcccctcctaagtcttaatgctgagatttctaaagatgctggtactgacagattaatggcttgcctagagctgtgcaagaaacagcctgccagtctgtcattgtcagggaccagggcaaaaccaagagctgttcttcccagaagagccctgcaaacacattggttcgtgcttccctttacttcttctggtcagataccatgaatgccagtcatcagtaaatcttaatacacttttgctttattctcacatgccattcaccagattatttgatggtacaaagaagcagaagtgtaattttccttttcccagcatgacgaaaaattggagttctgccatttgagcagcttactggaaagatccagccttacttgtcttaaattgtccaacaaggtgactcattgcccggcaaacacttttaccctcagatgttactcatgatattataaaatatgaggccagtgctcaggtttgcatcataagtgagctatccctgaagggttttaattacttatttggtgtcctgattatatttgcaaacttctttataaaaggtgaaaaaagcacacaaaagagagggtgtcttcatattaaaccttcacaaccttcatgatttcataggattattttggaaatatagcacttgactttatgaaaggatctgggctaggtatattaggggtagttgccaataacctgaagaagctggcattgtttacagaaacagatcaagggctataatttatgtcattttatagcagcagtatctattaatacatgccttttcctcccatccacctcccccgcacacacacaaagatgacctgggacatgatttttttattcccacattttcttggagcacaaacaactttgttgaggattttggaaggaaagcacaactgggtcctttattcatttctgggacagaaagagggtcagtggacttttgtgggcctccagcttctctcagagtctccccctctgcagcccatcctgggagtgtattaactggagggaagatgggtcttgcagtacatttgttttgcccagccatcactcttttttgtgaggagcctaaatacattcttcctggggtccagagtccccattcaaggcagtcaagttaagacactaacttggccctttcctgatggaaatatttcctccatagcagaagttgtgttctgacaagactgagagagttacatgttgggaaaaaaaagaagcattaacttagtagaactgaaccaggagcattaagttctgaaattttgaatcatctctgaaatgaagcaggtgtagcctgccctctcatcaatccgtctgggtgccagaactcaaggttcagtggacacatccccctgttagagaccctcatgggctaggacttttcatctaggatagattcaagacctttacctcagaattatgtaaactgtgattgtgttttagaaaaattattatttgctaaaaccatttaagtctttgtatatgtgtaaatgatcacaaaaatgtattttataaaatgttctgtacaataaagttacacctcaaagtgtactcttggaatggattctttcctgtaaagtcttatctgcgactctgtctcgggaatgttttgtctgttgccgtcagccgaactttgttatggagggagcagcctcacacaagcagaaacactcctgtggatggtattgtagcatgtattgtttattttagtcaatagaccctctccttataaatggtgtttagtcttcctgttgcatttcatgggcctgggggtttcctagcagaggatattggagcccctttttgtgacattaccaattacatctttgtccacgtttaatactttgttttggaaaatttaaatgctgcagatttgtgtagagttctaataccaaagacagaagtaaatgttttccatatactttgtcttgcctgtatgcagcccttgtgtaatatggtgaattagagtggtatttcactttgtattattttgtaaatatgtcaatataataaatagtgactaaaaaaaaaaaaaa

SEQ ID NO: 741 - DNA, 303 bp, Homo sapiens
gagaggagggcacacttggaactcccctccccacaatacgtgattatttacattttagtaattggacaatcccggctcaggaggaggttgcaagaatctgcaaaagttggagggagcgccccaggagaacaaacagcaagccttatttcccctagcccatcccccaaaaaaccatccatcccatcctagtgtctggtggtgtccggtggtgtccatcttccattccttcccaaattatgggaagtaaggtttcttcttcaccagaataagagcacttggggataaacagagtagggttccctt

SEQ ID NO: 742 - DNA, 557 bp, Homo sapiens
  modified_base (388)..(388): a, c, t or g
  modified_base (435)..(435): a, c, t or g
  modified_base (488)..(488): a, c, t or g
  modified_base (507)..(507): a, c, t or g
  modified_base (537)..(537): a, c, t or g
  modified_base (549)..(549): a, c, t or g
ccttgtcagactcagtcacatgcccactcgaagtcgcactgctatggaaagtgggtgcaggtggtgggcaccctggcgtgatccgcctgcttgactggtttgagacacaggagggcttcatgctggtcctcgagcggcctttgcccgcccaggatctctttgactatatcacagagaagggcccactgggtgaaggcccaagccgctgcttctttggccaagtagtggcagccatccagcactgccattcccgtggagttgtccatcgtgacatcaaggatgagaacatcctgatagacctacgccgtggctgtgcaaactcattgattttggttctggtgccctgcttcatgatgaaccctacactgactttgatgggacaagggtntacagccccccagagtggatctctcgacaccagttaccatggcactnccggccactgtctgggtcattggggcattcctcctctatggacatggtgtttnggggacattccctttgagnagggaccaggggattttggaagctgagttncattttcccagnccattttt

SEQ ID NO: 743 - DNA, 2101 bp, Homo sapiens
cgcgcgcggcgaatctcaacgctgcgccgtctgcgggcgcttccgggccaccagtttctctgctttccaccctggcgccccccagccctggctccccagctgcgctgccccgggcgtccacgccctgcgggcttagcgggttcagtgggctcaatctgcgcagcgccacctccatgttgaccaagcctctacaggggcctcccgcgccccccgggacccccacgccgccgccaggaggcaaggatcgggaagcgttcgaggccgagtatcgactcggccccctcctgggtaaggggggctttggcaccgtcttcgcaggacaccgcctcacagatcgactccaggtggccatcaaagtgattccccggaatcgtgtgctgggctggtcccccttgtcagactcagtcacatgcccactcgaagtcgcactgctatggaaagtgggtgcaggtggtgggcaccctggcgtgatccgcctgcttgactggtttgagacacaggagggcttcatgctggtcctcgagcggcctttgcccgcccaggatctctttgactatatcacagagaagggcccactgggtgaaggcccaagccgctgcttctttggccaagtagtggcagccatccagcactgccattcccgtggagttgtccatcgtgacatcaaggatgagaacatcctgatagacctacgccgtggctgtgccaaactcattgattttggttctggtgccctgcttcatgatgaaccctacactgactttgatgggacaagggtgtacagccccccagagtggatctctcgacaccagtaccatgcactcccggccactgtctggtcactgggcatcctcctctatgacatggtgtgtggggacattccctttgagagggaccaggagattctggaagctgagctccacttcccagcccatgtctccccagactgctgtgccctaatccgccggtgcctggcccccaaaccttcttcccgaccctcactggaagagatcctgctggacccctggatgcaaacaccagccgaggatgtacccctcaacccctccaaaggaggccctgcccctttggcctggtccttgctaccctaagcctggcctggcctggcctggcccccaatggtcagaagagccatcccatggccatgtcacagggatagatggacatttgttgacttggttttacaggtcattaccagtcattaaagtccagtattactaaggtaagggattgaggatcaggggttagaagacataaaccaagtctgcccagttcccttcccaatcctacaaaggagccttcctcccagaacctgtggtccctgattctggagggggaacttcttgcttctcattttgctaaggaagtttattttggtgaagttgttcccattctgagccccgggactcttattctgatgatgtgtcaccccacattggcacctcctactaccaccacacaaacttagttcatatgctcttacttgggcaagggtgctttccttccaataccccagtagcttttattttagtaaagggaccctttcccctagcctagggtcccatattgggtcaagctgcttacctgcctcagcccaggattctttattctgggggaggtaatgccctgttgttaccccaaggcttcttttttttttttttttgggtgaggggaccctactctgttatcccaagtgctcttattctggtgagaagaaccttacttccataatttgggaaggaatggaagatggacaccaccggacaccaccagacactaggatgggatggatggttttttgggggatgggctaggggaaataaggcttgctgtttgttctcctggggcgctccctccaacttttgcagattcttgcaacctcctcctgagccgggattgtccaattactaaaatgtaaataatcacgtattgtggggaggggagttccaagtgtgccctcctctcttctcctgcctggattatttaaaaagccatgtgtggaaacccactatttaataaaagtaatagaatcagaaaaaaaaaaaaaaaaaaaaaaaaaaaaaaaaaaaaaaaaaaaaaaaaa

SEQ ID NO: 744 - DNA, 322 bp, Homo sapiens
  modified_base (236)..(236): a, c, t or g
  modified_base (320)..(320): a, c, t or g
acaacatatatctttaattaaatttatattcggtgggtttaaaaaacattaagtcaggagatgatagctagggaaataaggtatcctgtgagtatttataacaaaatatttaaaatttaaaaagaataagaaacatcaattggctttttcgtaacttaaaagagactaaccaagtcgttgtttcccagttctgtacaagcagaggccacaggaggattcttacataagaagcacangggaaaagaattcgttaattctgcgtgtgtgtttttgtttctcagaattgttttggaagaactttgtccagtccagaaattgantt

SEQ ID NO: 745 - DNA, 376 bp, Homo sapiens
  modified_base (286)..(286): a, c, t or g
  modified_base (295)..(295): a, c, t or g
  modified_base (346)..(346): a, c, t or g
  modified_base (352)..(352): a, c, t or g
  modified_base (372)..(372): a, c, t or g
gaaaccctagaatacagacagcaatattttatattcatgtttatcaaagtgagaggacttatattcctacatcaagttactactgagagtaaatttattttgagttttatcccgtaagttctgttttgattttttttaaaaaacaaacccttttagtcactttaatcagaattttaaatgttcatgttacataccaaattataatatctaatggagcaatttgtcttttgctatattctccaagattatctcttaagaccatatgccccctgttttaatgtttctnacatcttgngtttactcagttctgacttggacaaaagttcttccaaacaattctcgaganacacanaacacacaccgcagaggttnacaa

SEQ ID NO: 746 - DNA, 6445 bp, Homo sapiens
aggggggaaggaagagtagctccttcttcttcttcttttttttttcttccactcttaaaaagcttctttctcttcacccaagcctcactgtccctctccggctctagctctctccatataaaccctcaagattatgtcaattggttagagccagccgggaatttcgtgcgggtgctgaaggagctgcgggagccggagaagaatgaaactgcgtggagtcagcctggctgccggcttgttcttactggccctgagtctttgggggcagcctgcagaggctgcggcttgctatgggtgttctccaggatcaaagtgtgactgcagtggcataaaaggggaaaagggagagagagggtttccaggtttggaaggacacccaggattgcctggatttccaggtccagaagggcctccggggcctcggggacaaaagggtgatgatggaattccagggccaccaggaccaaaaggaatcagaggtcctcctggacttcctggatttccagggacaccaggtcttcctggaatgccaggccacgatggggccccaggacctcaaggtattcccggatgcaatggaaccaagggagaacgtggatttccaggcagtcccggttttcctggtttacagggtcctccaggaccccctgggatcccaggtatgaagggtgaaccaggtagtataattatgtcatcactgccaggaccaaagggtaatccaggatatccaggtcctcctggaatacaaggcctacctggtcccactggtataccagggccaattggtcccccaggaccaccaggtttgatgggccctcctggtccaccaggacttccaggacctaaggggaatatgggcttaaatttccagggacccaaaggtgaaaaaggtgagcaaggtcttcagggcccacctgggccacctgggcagatcagtgaacagaaaagaccaattgatgtagagtttcagaaaggagatcagggacttcctggtgaccgagggcctcctggacctccagggatacgtggtcctccaggtcccccaggtggtgagaaaggtgagaagggtgagcaaggagagccaggcaaaagaggtaaaccaggcaaagatggagaaaatggccaaccaggaattcctggtttgcctggtgatcctggttaccctggtgaacccggaagggatggtgaaaagggccaaaaaggtgacactggcccacctggacctcctggacttgtaattcctagacctgggactggtataactataggagaaaaaggaaacattgggttgcctgggttgcctggagaaaaaggagagcgaggatttcctggaatacagggtccacctggccttcctggacctccaggggctgcagttatgggtcctcctggccctcctggatttcctggagaaaggggtcagaaaggtgatgaaggaccacctggaatttccattcctggacctcctggacttgacggacagcctggggctcctgggcttccagggcctcctggccctgctggccctcacattcctcctagtgatgagatatgtgaaccaggccctccaggccccccaggatctccaggtgataaaggactccaaggagaacaaggagtgaaaggtgacaaaggtgacacttgcttcaactgcattggaactggtatttcagggcctccaggtcaacctggtttgccaggtctcccaggtcctccaggatctcttggtttccctggacagaaaggggaaaaaggacaagctggtgcaactggtcccaaaggattaccaggcattccaggagctccaggtgctccaggctttcctggatctaaaggtgaacctggtgatatcctcacttttccaggaatgaagggtgacaaaggagagttgggttcccctggagctccagggcttcctggtttacctggcactcctggacaggatggattgccagggcttcctggcccgaaaggagagcctggtggaattacttttaagggtgaaagaggtccccctgggaacccaggtttaccaggcctcccagggaatatagggcctatgggtccccctggtttcggccctccaggcccagtaggtgaaaaaggcatacaaggtgtggcaggaaatccaggccagccaggaataccaggtcctaaaggggatccaggtcagactataacccagccggggaagcctggcttgcctggtaacccaggcagagatggtgatgtaggtcttccaggtgaccctggacttccagggcaaccaggcttgccagggatacctggtagcaaaggagaaccaggtatccctggaattgggcttcctggaccacctggtcccaaaggctttcctggaattccaggacctccaggagcacctgggacacctggaagaattggtctagaaggccctcctgggccacccggctttccaggaccaaagggtgaaccaggatttgcattacctgggccacctgggccaccaggacttccaggtttcaaaggagcacttggtccaaaaggtgatcgtggtttcccaggacctccgggtcctccaggacgcactggcttagatgggctccctggaccaaaaggtgatgttggaccaaatggacaacctggaccaatgggacctcctgggctgccaggaataggtgttcagggaccaccaggaccaccagggattcctgggccaataggtcaacctggtttacatggaataccaggagagaagggggatccaggacctcctggacttgatgttccaggacccccaggtgaaagaggcagtccagggatccccggagcacctggtcctataggacctccaggatcaccagggcttccaggaaaagcaggtgcctctggatttccaggtaccaaaggtgaaatgggtatgatgggacctccaggcccaccaggacctttgggaattcctggcaggagtggtgtacctggtcttaaaggtgatgatggcttgcagggtcagccaggacttcctggccctacaggagaaaaaggtagtaaaggagagcctggccttccaggccctcctggaccaatggatccaaatcttctgggctcaaaaggagagaagggggaacctggcttaccaggtatacctggagtttcagggccaaaaggttatcagggtttgcctggagacccagggcaacctggactgagtggacaacctggattaccaggaccaccaggtcccaaaggtaaccctggtctccctggacagccaggtcttataggacctcctggacttaaaggaaccatcggtgatatgggttttccagggcctcagggtgtggaagggcctcctggaccttctggagttcctggacaacctggctccccaggattacctggacagaaaggcgacaaaggtgatcctggtatttcaagcattggtcttccaggtcttcctggtccaaagggtgagcctggtctgcctggatacccagggaaccctggtatcaaaggttctgtgggagatcctggtttgcccggattaccaggaacccctggagcaaaaggacaaccaggccttcctggattcccaggaaccccaggccctcctggaccaaaaggtattagtggccctcctgggaaccccggccttccaggagaacctggtcctgtaggtggtggaggtcatcctgggcaaccagggcctccaggcgaaaaaggcaaacccggtcaagatggtattcctggaccagctggacagaagggtgaaccaggtcaaccaggctttggaaacccaggaccccctggacttccaggactttctggccaaaagggtgatggaggattacctgggattccaggaaatcctggccttccaggtccaaagggcgaaccaggctttcacggtttccctggtgtgcagggtcccccaggccctcctggttctccgggtccagctctggaaggacctaaaggcaaccctgggccccaaggtcctcctgggagaccaggtcctacaggttttcaaggtctaccaggtccagaaggtcctccaggtctccctggaaatggaggtattaaaggagagaagggaaatccaggccaacctgggctacctggcttgcctggtttgaaaggagatcaaggaccaccaggactccagggtaatcctggccggccgggtctcaatggaatgaaaggagatcctggtctccctggtgttccaggattcccaggcatgaaaggacccagtggagtacctggatcagctggccctgagggggaaccgggacttattggtcctccaggtcctcctggattacctggtccttcaggacagagtatcataattaaaggagatgctggtcctccaggaatccctggccagcctgggctaaagggtctaccaggaccccaaggacctcaaggcttaccaggtccaactggccctccaggagatcctggacgcaatggactccctggctttgatggtgcaggagggcgcaaaggagacccaggtctgccaggacagccaggtacccgtggtttggatggtccccctggtccagatggattgcaaggtcccccaggtccccctggaacctcctctgttgcacatggatttcttattacacgccacagccagacaacggatgcaccacaatgcccacagggaacacttcaggtctatgaaggcttttctctcctgtatgtacaaggaaataaaagagcccacggtcaagacttggggacggctggcagctgccttcgtcgctttagtaccatgcctttcatgttctgcaacatcaataatgtttgcaactttgcttcaagaaatgactattcttactggctctctaccccagagcccatgccaatgagcatgcaacccctaaagggccagagcatccagccattcattagtcgatgtgcagtatgtgaagctccagctgtggtgatcgcagttcacagtcagacgatccagattccccattgtcctcagggatgggattctctgtggattggttattccttcatgatgcatacaagtgcaggggcagaaggctcaggtcaagccctagcctcccctggttcctgcttggaagagtttcgttcagctcccttcatcgaatgtcatgggaggggtacctgtaactactatgccaactcctacagcttttggctggcaactgtagatgtgtcagacatgttcagtaaacctcagtcagaaacgctgaaagcaggagacttgaggacacgaattagccgatgtcaagtgtgcatgaagaggacataacattttgaagaattccttttgtgttttaaaatgtgatatatatatatataaaattcctaggatgcagtgtctcattgtccccaactttactactgctgccgtcaatggtgctactatatatgatcaagataacatgctgactagtaaccatgaagattcagatgtacctcagcaatgcgccagagcaaagtctctattatttttctactaaagaaataaggaagtgaatttactttttgggtccagaatgactttctccaagaattataagatgaaaattatatattttgcccagttactaaaatggtacattaaaaattcaattaagagaagagtcacattgagtaaaataaaagactgcagtttgtgggaagaattatttttcacggtgctactaatcctgctgtatcccgggtttttaatataaaggtgttaagcttattttgctttgtaagtaaagaatgtgtatattgtgaacagccttttagctcaaaatgttgagtcatttacatatgacatagcatgaatcactctttacagaaaatgtaggaaaccctagaatacagacagcaatattttatattcatgtttatcaaagtgagaggacttatattcctacatcaagttactactgagagtaaatttattttgagttttatcccgtaagttctgttttgattttttttaaaaaacaaacccttttagtcactttaatcagaattttaaatgttcatgttacataccaaattataatatctaatggagcaatttgtcttttgctatattctccaagattatctcttaagaccatatgccccctgttttaatgtttcttacatcttgtttttactcatttctgactggacaaagttcttccaaacaattctgagaaacaaaaacacacacgcagaattaacaattcttttccctgtgcttcttatgtaagaatcctcctgtggcctctgcttgtacagaactgggaaacaacacttggttagtctcttttaagttacaaaaagccaattgatgtttcttattctttttaaattttaaatattttgttataaatactcacaggataccttatttccctagctatcatctcctgacttaatgttttttaaacccaccaatataaatttaattaaagatatatgttgtaaggat

SEQ ID NO: 747 - DNA, 298 bp, Homo sapiens
  modified_base (60)..(60): a, c, t or g
  modified_base (254)..(254): a, c, t or g
  modified_base (279)..(280): a, c, t or g
aattccagaaattatcactttactatacaaaaaaacctaaacatttacaaaagaaaatanaaagaagttgcatttttaggccacattgggaaagttgcacaggagtctgatgaacaaacttcgtgaaacatctccgtaccatgccagtactatacagagaaacccagtcaaccattataccataggttgaggtatttagtacctgaaagtcaacccagtgctccctttgcttattatttgtctataaaaatatnaaacccggcatctttacaaaacctnnaattattggcaaataaac

SEQ ID NO: 748 - DNA, 3119 bp, Homo sapiens
cgcggtatctgcatcgggcctcactggcttcaggagctgaataccctcccaggcacacacaggtgggacacaaataagggttttggaaccactattttctcatcacgacagcaacttaaaatgcctgggaagatggtcgtgatccttggagcctcaaatatactttggataatgtttgcagcttctcaagcttttaaaatcgagaccaccccagaatctagatatcttgctcagattggtgactccgtctcattgacttgcagcaccacaggctgtgagtccccatttttctcttggagaacccagatagatagtccactgaatgggaaggtgacgaatgaggggaccacatctacgctgacaatgaatcctgttagttttgggaacgaacactcttacctgtgcacagcaacttgtgaatctaggaaattggaaaaaggaatccaggtggagatctactcttttcctaaggatccagagattcatttgagtggccctctggaggctgggaagccgatcacagtcaagtgttcagttgctgatgtatacccatttgacaggctggagatagacttactgaaaggagatcatctcatgaagagtcaggaatttctggaggatgcagacaggaagtccctggaaaccaagagtttggaagtaacctttactcctgtcattgaggatattggaaaagttcttgtttgccgagctaaattacacattgatgaaatggattctgtgcccacagtaaggcaggctgtaaaagaattgcaagtctacatatcacccaagaatacagttatttctgtgaatccatccacaaagctgcaagaaggtggctctgtgaccatgacctgttccagcgagggtctaccagctccagagattttctggagtaagaaattagataatgggaatctacagcacctttctggaaatgcaactctcaccttaattgctatgaggatggaagattctggaatttatgtgtgtgaaggagttaatttgattgggaaaaacagaaaagaggtggaattaattgttcaagagaaaccatttactgttgagatctcccctggaccccggattgctgctcagattggagactcagtcatgttgacatgtagtgtcatgggctgtgaatccccatctttctcctggagaacccagatagacagccctctgagcgggaaggtgaggagtgaggggaccaattccacgctgaccctgagccctgtgagttttgagaacgaacactcttatctgtgcacagtgacttgtggacataagaaactggaaaagggaatccaggtggagctctactcattccctagagatccagaaatcgagatgagtggtggcctcgtgaatgggagctctgtcactgtaagctgcaaggttcctagcgtgtacccccttgaccggctggagattgaattacttaagggggagactattctggagaatatagagtttttggaggatacggatatgaaatctctagagaacaaaagtttggaaatgaccttcatccctaccattgaagatactggaaaagctcttgtttgtcaggctaagttacatattgatgacatggaattcgaacccaaacaaaggcagagtacgcaaacactttatgtcaatgttgcccccagagatacaaccgtcttggtcagcccttcctccatcctggaggaaggcagttctgtgaatatgacatgcttgagccagggctttcctgctccgaaaatcctgtggagcaggcagctccctaacggggagctacagcctctttctgagaatgcaactctcaccttaatttctacaaaaatggaagattctggggtttatttatgtgaaggaattaaccaggctggaagaagcagaaaggaagtggaattaattatccaagttactccaaaagacataaaacttacagcttttccttctgagagtgtcaaagaaggagacactgtcatcatctcttgtacatgtggaaatgttccagaaacatggataatcctgaagaaaaaagcggagacaggagacacagtactaaaatctatagatggcgcctataccatccgaaaggcccagttgaaggatgcgggagtatatgaatgtgaatctaaaaacaaagttggctcacaattaagaagtttaacacttgatgttcaaggaagagaaaacaacaaagactatttttctcctgagcttctcgtgctctattttgcatcctccttaataatacctgccattggaatgataatttactttgcaagaaaagccaacatgaaggggtcatatagtcttgtagaagcacagaaatcaaaagtgtagctaatgcttgatatgttcaactggagacactatttatctgtgcaaatccttgatactgctcatcattccttgagaaaaacaatgagctgagaggcagacttccctgaatgtattgaacttggaaagaaatgcccatctatgtcccttgctgtgagcaagaagtcaaagtaaaacttgctgcctgaagaacagtaactgccatcaagatgagagaactggaggagttccttgatctgtatatacaataacataatttgtacatatgtaaaataaaattatgccatagcaagattgcttaaaatagcaacactctatatttagattgttaaaataactagtgttgcttggactattataatttaatgcatgttaggaaaatttcacattaatatttgctgacagctgacctttgtcatctttcttctattttattccctttcacaaaattttattcctatatagtttattgacaataatttcaggttttgtaaagatgccgggttttatatttttatagacaaataataagcaaagggagcactgggttgactttcaggtactaaatacctcaacctatggtataatggttgactgggtttctctgtatagtactggcatggtacggagatgtttcacgaagtttgttcatcagactcctgtgcaactttcccaatgtggcctaaaaatgcaacttctttttattttcttttgtaaatgtttaggtttttttgtatagtaaagtgataatttctggaattagaaaaaaaaaaaaaaaaaaa

SEQ ID NO: 749 - DNA, 366 bp, Homo sapiens
  modified_base (164)..(164): a, c, t or g
  modified_base (168)..(168): a, c, t or g
  modified_base (238)..(238): a, c, t or g
  modified_base (281)..(281): a, c, t or g
  modified_base (286)..(286): a, c, t or g
  modified_base (295)..(295): a, c, t or g
  modified_base (300)..(300): a, c, t or g
  modified_base (309)..(309): a, c, t or g
  modified_base (313)..(313): a, c, t or g
  modified_base (315)..(315): a, c, t or g
  modified_base (342)..(342): a, c, t or g
tttttaccatggaataaacattttatttatttgtgtatgtaacatttattgacatctacccactgcaagtatagatgaataagacacagtcacaccataaaggagtttatccttaaaaggagtgaaagacattcaaaaaccaactgcaataaaaaagggtgacnttanttgctaatgggagtggaggaacagtggcttatccaattctgattgtgcaaccaatgatatacaatcccantgaatgaatgaatggatgttctgcctgaaagtttcctatttcntttcntgaaattgnctccnctttcccanaaangnttccgaaatgccctttaatatcacccncgggaaaagtttaaaattttgggg

SEQ ID NO: 750 - DNA, 336 bp, Homo sapiens
  modified_base (219)..(219): a, c, t or g
  modified_base (223)..(223): a, c, t or g
  modified_base (227)..(228): a, c, t or g
  modified_base (230)..(231): a, c, t or g
  modified_base (236)..(236): a, c, t or g
  modified_base (238)..(240): a, c, t or g
  modified_base (251)..(251): a, c, t or g
  modified_base (255)..(255): a, c, t or g
  modified_base (263)..(264): a, c, t or g
  modified_base (275)..(275): a, c, t or g
  modified_base (283)..(284): a, c, t or g
  modified_base (294)..(294): a, c, t or g
  modified_base (297)..(297): a, c, t or g
  modified_base (304)..(304): a, c, t or g
  modified_base (307)..(307): a, c, t or g
  modified_base (309)..(309): a, c, t or g
  modified_base (314)..(314): a, c, t or g
  modified_base (317)..(318): a, c, t or g
  modified_base (323)..(323): a, c, t or g
  modified_base (327)..(327): a, c, t or g
  modified_base (331)..(331): a, c, t or g
atatagcccaaaatggacttccaaagtggtcacctacaggatcgtatcatatactcgagacttaccgcatattacagtggatcgattagtgtcaaaggctttaaacatgtggggcaaagagatccccctgcatttcaggaaagttgtatggggaactgctgacatcatgattggctttgcgcgaggagtcatggggactcctacccatttgatgggccnaggnaacnngnnggctnannnctttgcgcctngganaagtctcnnatggaaattcncacttcgnntgaggagttnacncttgacnggntngtatncanntctangggntaancttcc

SEQ ID NO: 751 - DNA, 1127 bp, Homo sapiens
accaaatcaaccataggtccaagaacaattgtctctggacggcagctatgcgactcaccgtgctgtgtgctgtgtgcctgctgcctggcagcctggccctgccgctgcctcaggaggcgggaggcatgagtgagctacagtgggaacaggctcaggactatctcaagagattttatctctatgactcagaaacaaaaaatgccaacagtttagaagccaaactcaaggagatgcaaaaattctttggcctacctataactggaatgttaaactcccgcgtcatagaaataatgcagaagcccagatgtggagtgccagatgttgcagaatactcactatttccaaatagcccaaaatggacttccaaagtggtcacctacaggatcgtatcatatactcgagacttaccgcatattacagtggatcgattagtgtcaaaggctttaaacatgtggggcaaagagatccccctgcatttcaggaaagttgtatggggaactgctgacatcatgattggctttgcgcgaggagctcatggggactcctacccatttgatgggccaggaaacacgctggctcatgcctttgcgcctgggacaggtctcggaggagatgctcacttcgatgaggatgaacgctggacggatggtagcagtctagggattaacttcctgtatgctgcaactcatgaacttggccattctttgggtatgggacattcctctgatcctaatgcagtgatgtatccaacctatggaaatggagatccccaaaattttaaactttcccaggatgatattaaaggcattcagaaactatatggaaagagaagtaattcaagaaagaaatagaaacttcaggcagaacatccattcattcattcattggattgtatatcattgttgcacaatcagaattgataagcactgttcctccactccatttagcaattatgtcacccttttttattgcagttggtttttgaatgtctttcactccttttattggttaaactcctttatggtgtgactgtgtcttattccatctatgagctttgtcagtgcgcgtagatgtcaataaatgttacatacacaaataaataaaatgtttattccatggtaaattta

SEQ ID NO: 752 - DNA, 407 bp, Homo sapiens
  modified_base (369)..(369): a, c, t or g
aaaaaaaaagagtttatttagaaagtatcatagtgtaaacaaacaaattgtaccactttgattttcttggaatacaagactcgtgatgcaaagctgaagttgtgtgtacaagactcttgacagttgtgcttctctaggaggttgggtttttttaaaaaaagaattatctgtgaaccttacgtgattaataaagatttcctttaaggcagaggctggtcgagatgctgctgttatcttctgcctcagacagacagtataagtggtcttgtttctaagattcctaccaccagttactttgggccaagtatccacatccccttgcgtattgggaggtgggtgaagagtgttggatgcaaagtggttattatngggaagtagctcgatggtaaaaggacaaacacctatcc

SEQ ID NO: 753 - DNA, 384 bp, Homo sapiens
  modified_base (195)..(195): a, c, t or g
  modified_base (310)..(310): a, c, t or g
  modified_base (368)..(368): a, c, t or g
ctgttcaggggatccttctgtttctcacggggtgaaacatgtctttagttcctcatgttaacacgaagccagagcccacatgaactgttggatgtcttccttagaaagggtaggcatggaaaattccacgaggctcattctcagtatctcattaactcattgaaagattccagttgtatttgtcacctggggtgnaagaccagacaggctttcccaggcctgggtatccagggaggctctgcagccctgctgaagggccctaactagagttctagagtttctgattctgtttctcagtaagtccttttangaggcttgctaatacttggtctgcttcaaaggaggtcgacctttctaaatgtatgaangaaatggggatgcatt

SEQ ID NO: 754 - DNA, 3047 bp, Homo sapiens
gggacagagacccctgtgggttgtgaggccgccccgggcggtggcagcaagaagagggactccctggggactgcgggctcagcgcacctcattatcaaggatcttggagaaattcattcaaggcttttggatcacagaccagttattcaaggtgaaactcgttattttgtaaaagaatttgaagaaaaacgtggtcttcgagaaatgcgagttcttgaaaatttgaagaacatgatccatgaaacaaatgaacatactcttcccaaatgtagagacacaatgcgggacagcctcagccaggttctccagagattgcaagcagctaatgactcagtctgtagactccaacagagggaacaggaacgaaaaaaggtgtggacactgccagcggctgcagccgacttggaatgacctgggagacaaatacaacagcatggaagatgccaaagtctatgtggctaaagtggactgcacggcccactccgacgtgtgctccgcccagggggtgcgaggataccccaccttaaagcttttcaagccaggccaagaagctgtgaagtaccagggtcctcgggacttccagacactggaaaactggatgctgcagacactgaacgaggagccagtgacaccagagccggaagtggaaccgcccagtgcccccgagctcaagcaagggctgtatgagctctcagcaagcaactttgagctgcacgttgcacaaggcgaccactttatcaagttcttcgctccgtggtgtggtcactgcaaagccctggctccaacctgggagcagctggctctgggccttgaacattccgaaactgtcaagattggcaaggttgattgtacacagcactatgaactctgctccggaaaccaggttcgtggctatcccactcttctctggttccgagatgggaaaaaggtggatcagtacaagggaaagcgggatttggagtcactgagggagtacgtggagtcgcagctgcagcgcacagagactggagcgacggagaccgtcacgccctcagaggccccggtgctggcagctgagcccgaggctgacaagggcactgtgttggcactcactgaaaataacttcgatgacaccattgcagaaggaataaccttcatcaagttttatgctccatggtgtggtcattgtaagactctggctcctacttgggaggaactctctaaaaaggaattccctggtctggcgggggtcaagatcgccgaagtagactgcactgctgaacggaatatctgcagcaagtattcggtacgaggctaccccacgttattgcttttccgaggagggaagaaagtcagtgagcacagtggaggcagagaccttgactcgttacaccgctttgtcctgagccaagcgaaagacgaactttaggaacacagttggaggtcacctctcctgcccagctcccgcaccctgcgtttaggagttcagtcccacagaggccactgggttcccagtggtggctgttcagaaagcagaacatactaagcgtgaggtatcttctttgtgtgtgtgttttccaagccaacacactctacagattctttattaagttaagtttctctaagtaaatgtgtaactcatggtcactgtgtaaacattttcagtggcgatatatcccctttgaccttctcttgatgaaatttacatggtttcctttgagactaaaatagcgttgagggaaatgaaattgctggactatttgtggctcctgagttgagtgattttggtgaaagaaagcacatccaaagcatagtttacctgcccacgagttctggaaaggtggccttgtggcagtattgacgttcctctgatcttaaggtcacagttgactcaatactgtgttggtccgtagcatggagcagattgaaatgcaaaaacccacacctctggaagataccttcacggccgctgctggagcttctgttgctgtgaatacttctctcagtgtgagaggttagccgtgatgaaagcagcgttacttctgaccgtgcctgagtaagagaatgctgatgccataactttatgtgtcgatacttgtcaaatcagttactgttcaggggatccttctgtttctcacggggtgaaacatgtctttagttcctcatgttaacacgaagccagagcccacatgaactgttggatgtcttccttagaaagggtaggcatggaaaattccacgaggctcattctcagtatctcattaactcattgaaagattccagttgtatttgtcacctggggtgacaagaccagacaggctttcccaggcctgggtatccagggaggctctgcagccctgctgaagggccctaactagagttctagagtttctgattctgtttctcagtagtccttttagaggcttgctatacttggtctgcttcaaggaggtcgaccttctaatgtatgaagaatgggatgcatttgatctcaagaccaaagacagatgtcagtgggctgctctggccctggtgtgcacggctgtggcagctgttgatgccagtgtcctctaactcatgctgtccttgtgattaaacacctctatctcccttgggaataagcacatacaggcttaagctctaagatagataggtgtttgtccttttaccatcgagctacttcccataataaccactttgcatccaacactcttcacccacctcccatacgcaaggggatgtggatacttggcccaaagtaactggtggtaggaatcttagaaacaagaccacttatactgtctgtctgaggcagaagataacagcagcatctcgaccagcctctgccttaaaggaaatctttattaatcacgtatggttcacagataattctttttttaaaaaaacccaacctcctagagaagcacaactgtcaagagtcttgtacacacaacttcagctttgcatcacgagtcttgtattccaagaaaatcaaagtggtacaatttgtttgtttacactatgatactttctaaataaactctttttttttaaaaaaaaaaaaaaaa

SEQ ID NO: 755 - DNA, 444 bp, Homo sapiens
  modified_base (266)..(266): a, c, t or g
  modified_base (348)..(348): a, c, t or g
agaatgaaataatcagtttaatatttatagacttgagaaagaacttgaattaaaattcagtctggagtctgaattagcaccatctgaatacagaaggaattctatgtacatgcacaaattagtttaattaacatatataggtaaaatatatttgtttgttttacttgatatacttgttttgacagactcttcctggggttacacttatttttattagttggctgggcatgatacaggttgaacgcccctcagttccagggccttgnaaaattaacctccagtggcttgctgtgcctttggtgagcttcagggatctgatgcaacctcggaacggaatactggttgttnaggccaaactgcttgaggtcatctgggaagccctccaacaaacacagggtcatttgtgtcagctgatgtagatgctgggtttgggccttgggcttc

SEQ ID NO: 756 - DNA, 415 bp, Homo sapiens
  modified_base (323)..(323): a, c, t or g
  modified_base (332)..(333): a, c, t or g
  modified_base (351)..(351): a, c, t or g
  modified_base (357)..(357): a, c, t or g
  modified_base (374)..(374): a, c, t or g
  modified_base (384)..(384): a, c, t or g
  modified_base (388)..(388): a, c, t or g
  modified_base (409)..(409): a, c, t or g
cggcacgaggctgccgatctggaacaacccacctccagcttccatgttgggacatgttttgcaaatgctcagaggggaacatattttgacggaaccggttttgccaaagcagttggtggattcaaagtgggattggaccttcttgtagaatttgaattccgcacaactacaacgactggagttcttctggggatcagtagtcaaaaaatggatggaatgggtattgaaatgattgatgaaaagttgatgtttcatgtggacaatggtgcgggcagattcactgctgtctatgatgctggggttccagggcatttgtggtgatngacaatggnntaaagtcacttgccaacnatggtnaaacacccgcgatttgngctcacagtngatngggaaccaggttggaaacccnaagccc

SEQ ID NO: 757 - DNA, 9649 bp, Homo sapiens
cagcgactcctctggctcccgagaagtggatccggtcgcggccactacgatgccgggagccgccggggtcctcctccttctgctgctctccggaggcctcgggggcgtacaggcgcagcggccgcagcagcagcggcagtcacaggcacatcagcaaagaggtttattccctgctgtcctgaatcttgcttctaatgctcttatcacgaccaatgcaacatgtggagaaaaaggacctgaaatgtactgcaaattggtagaacatgtccctgggcagcctgtgaggaacccgcagtgtcgaatctgcaatcaaaacagcagcaatccaaaccagagacacccgattacaaatgctattgatggaaagaacacttggtggcagagtcccagtattaagaatggaatcgaataccattatgtgacaattacactggatttacagcaggtgttccagatcgcgtatgtgattgtgaaggcagctaactccccccggcctggaaactggattttggaacgctctcttgatgatgttgaatacaagccctggcagtatcatgctgtgacagacacggagtgcctaacgctttacaatatttatccccgcactgggccaccgtcatatgccaaagatgatgaggtcatctgcacttcattttactccaagatacaccccttagaaaatggagagattcacatctctttaatcaatgggagaccaagtgccgatgatccttctccagaactgctagaatttacctccgctcgctatattcgcctgagatttcagaggatccgcacactgaatgctgacttgatgatgtttgctcacaaagacccaagagaaattgaccccattgtcaccagaagatattactactcggtcaaggatatttcagttggagggatgtgcatctgctatggtcatgccagggcttgtccacttgatccagcgacaaataaatctcgctgtgagtgtgagcataacacatgtggcgatagctgtgatcagtgctgtccaggattccatcagaaaccctggagagctggaacttttctaactaaaactgaatgtgaagcatgcaattgtcatggaaaagctgaagaatgctattatgatgaaaatgttgccagaagaaatctgagtttgaatatacgtggaaagtacattggagggggtgtctgcattaattgtacccaaaacactgctggtataaactgcgagacatgtacagatggcttcttcagacccaaaggggtatctccaaattatccaaggccatgccagccatgtcattgcgatccaattggttccttaaatgaagtctgtgtcaaggatgagaaacatgctcgacgaggtttggcacctggatcctgtcattgcaaaactggttttggaggtgtgagctgtgatcggtgtgccaggggctacactggctacccggactgcaaagcctgtaactgcagtgggttagggagcaaaaatgaggatccttgttttggcccctgtatctgcaaggaaaatgttgaaggaggagactgtagtcgttgcaaatccggcttcttcaatttgcaagaggataattggaaaggctgcgatgagtgtttctgttcaggggtttcaaacagatgtcagagttcctactggacctatggcaaaatacaagatatgagtggctggtatctgactgaccttcctggccgcattcgagtggctccccagcaggacgacttggactcacctcagcagatcagcatcagtaacgcggaggcccggcaagccctgccgcacagctactactggagcgcgccggctccctatctgggaaacaaactcccagcagtaggaggacagttgacatttaccatatcatatgaccttgaagaagaggaagaagatacagaacgtgttctccagcttatgattatcttagagggtaatgacttgagcatcagcacagcccaagatgaggtgtacctgcacccatctgaagaacatactaatgtattgttacttaaagaagaatcatttaccatacatggcacacattttccagtccgtagaaaggaatttatgacagtgcttgcgaatttgaagagagtcctcctacaaatcacatacagctttgggatggatgccatcttcaggttgagctctgttaaccttgaatccgctgtctcctatcctactgatggaagcattgcagcagctgtagaagtgtgtcagtgcccaccagggtatactggctcctcttgtgaatcttgttggcctaggcacaggcgagttaacggcactatttttggtggcatctgtgagccatgtcagtgctttggtcatgcggagtcctgtgatgacgtcactggagaatgcctgaactgtaaggatcacacaggtggcccatattgtgataaatgtcttcctggtttctatggcgagcctactaaaggaacctctgaagactgtcaaccctgtgcctgtccactcaatatcccatccaataactttagcccaacgtgccatttagaccggagtcttggattgatctgtgatggatgccctgtcgggtacacaggaccacgctgtgagaggtgtgcagaaggctattttggacaaccctctgtacctggaggatcatgtcagccatgccaatgcaatgacaaccttgacttctccatccctggcagctgtgacagcttgtctggctcctgtctgatatgtaaaccaggtacaacaggccggtactgtgagctctgtgctgatggatattttggagatgcagttgatgcgaagaactgtcagccctgtcgctgtaatgccggtggctctttctctgaggtttgccacagtcaaactggacagtgtgagtgcagagccaacgttcagggtcagagatgtgacaaatgcaaggctgggacctttggcctacaatcagcaaggggctgtgttccctgcaactgcaattcttttgggtctaagtcattcgactgtgaagagagtggacaatgttggtgccaacctggagtcacagggaagaaatgtgaccgctgtgcccacggctatttcaacttccaagaaggaggctgcacagcttgtgaatgttctcatctgggtaataattgtgacccaaagactgggcgatgcatttgcccacccaataccattggagagaaatgttctaaatgtgcacccaatacctggggccacagcattaccactggttgtaaggcttgtaactgcagcacagtgggatccttggatttccaatgcaatgtaaatacaggccaatgcaactgtcatccaaaattctctggtgcaaaatgtacagagtgcagtcgaggtcactggaactaccctcgctgcaatctctgtgactgcttcctccctgggacagatgccacaacctgtgattcagagactaaaaaatgctcctgtagtgatcaaactgggcagtgcacttgtaaggtgaatgtggaaggcatccactgtgacagatgccggcctggcaaattcggactcgatgccaagaatccacttggctgcagcagctgctattgcttcggcactactacccagtgctctgaagcaaaaggactgatccggacgtgggtgactctgaaggctgagcagaccattctacccctggtagatgaggctctgcagcacacgaccaccaagggcattgtttttcaacatccagagattgttgcccacatggacctgatgagagaagatctccatttggaacctttttattggaaacttccagaacaatttgaaggaaagaagttgatggcctatgggggcaaactcaagtatgcaatctatttcgaggctcgggaagaaacaggtttctctacatataatcctcaagtgatcattcgaggtgggacacctactcatgctagaattatcgtcaggcatatggctgctcctctgattggccaattgacaaggcatgaaattgaaatgacagagaaagaatggaaatattatggggatgatcctcgagtccatagaactgtgacccgagaagacttcttggatatactatatgatattcattacattcttatcaaagctacttatggaaatttcatgcgacaaagcaggatttctgaaatctcaatggaggtagctgaacaaggacgtggaacaacaatgactcctccagctgacttgattgaaaaatgtgattgtcccctgggctattctggcctgtcctgtgaggcatgcttgccgggattttatcgactgcgttctcaaccaggtggccgcacccctggaccaaccctgggcacctgtgttccatgtcaatgtaatggacacagcagcctgtgtgaccctgaaacatcgatatgccagaattgtcaacatcacactgctggtgacttctgtgaacgatgtgctcttggatactatggaattgtcaagggattgccaaatgactgtcagcaatgtgcctgccctctgatttcttccagtaacaatttcagcccctcttgtgtcgcagaaggacttgacgactaccgctgcacggcttgtccacggggatatgaaggccagtactgtgaaaggtgtgcccctggctatactggcagtccaggcaaccctggaggctcctgccaagaatgtgagtgtgatccctatggctcactgcctgtgccctgtgaccctgtcacaggattctgcacgtgccgacctggagccacgggaaggaagtgtgacggctgcaagcactggcatgcacgcgagggctgggagtgtgttttttgtggagatgagtgcactggccttcttctcggtgacttggctcgcctggagcagatggtcatgagcatcaacctcactggtccgctgcctgcgccatataaaatgctgtatggtcttgaaaatatgactcaggagctaaagcacttgctgtcacctcagcgggccccagagaggcttattcagctggcagagggcaatctgaatacactcgtgaccgaaatgaacgagctgctgaccagggctaccaaagtgacagcagatggcgagcagaccggacaggatgctgagaggaccaacacaagagcaaagtccctgggagaattcattaaggagcttgcccgggatgcagaagctgtaaatgaaaaagctataaaactaaatgaaactctaggaactcgagacgaggcctttgagagaaatttggaagggcttcagaaagagattgaccagatgattaaagaactgaggaggaaaaatctagagacacaaaaggaaattgctgaagatgagttggtagctgcagaagcccttctgaaaaaagtgaagaagctgtttggagagtcccggggggaaaatgaagaaatggagaaggatctccgggaaaaactggctgactacaaaaacaaagttgatgatgcttgggaccttttgagagaagccacagataaaatcagagaagctaatcgcctatttgcagtaaatcagaaaaacatgactgcattggagaaaaagaaggaggctgttgagagcggcaaacgacaaattgagaacactttaaaagaaggcaatgacatactcgatgaagccaaccgtcttgcagatgaaatcaactccatcatagactatgttgaagacatccaaactaaattgccacctatgtctgaggagcttaatgataaaatagatgacctctcccaagaaataaaggacaggaagcttgctgagaaggtgtcccaggctgagagccacgcagctcagttgaatgactcatctgctgtccttgatggaatccttgatgaggctaaaaacatctccttcaatgccactgcagccttcaaagcttacagcaatattaaggactatattgatgaagctgagaaagttgccaaagaagccaaagatcttgcacatgaagctacaaaactggcaacaggtcctcggggtttattaaaggaagatgccaaaggctgtcttcagaaaagcttcaggattcttaacgaagccaagaagttagcaaatgatgtaaaagaaaatgaagaccatctaaatggcttaaaaaccaggatagaaaatgctgatgctagaaatggggatctcttgagaactttgaatgacactttgggaaagttatcagctattccaaatgatacagctgctaaactgcaagctgttaaggacaaagccagacaagccaacgacacagctaaagatgtactggcacagattacagagctccaccagaacctcgatggcctgaagaagaattacaataaactagcagacagcgtcgccaaaacgaatgctgtggttaaagatccttccaagaacaaaatcattgccgatgcagatgccactgtcaaaaatttagaacaggaagctgaccggctaatagataaactcaaacccatcaaggaacttgaggataacctaaagaaaaacatctctgagataaaggaattgataaaccaagctcggaaacaagccaattctatcaaagtatctgtgtcttcaggaggtgactgcattcgaacatacaaaccagaaatcaagaaaggaagttacaataatattgttgtcaacgtaaagacagctgttgctgataacctcctcttttatcttggaagtgccaaatttattgactttctggctatagaaatgcgtaaaggcaaagtcagcttcctctgggatgttggatctggagttggacgtgtagagtacccagatttgactattgatgactcatattggtaccgtatcgtagcatcaagaactgggagaaatggaactatttctgtgagagccctggatggacccaaagccagcattgtgcccagcacacaccattcgacgtctcctccagggtacacgattctagatgtggatgcaaatgcaatgctgtttgttggtggcctgactgggaaattaaagaaggctgatgctgtacgtgtgattacattcactggctgcatgggagaaacatactttgacaacaaacctataggtttgtggaatttccgagaaaaagaaggtgactgcaaaggatgcactgtcagtcctcaggtggaagatagtgaggggactattcaatttgatggagaaggttatgcattggtcagccgtcccattcgctggtaccccaacatctccactgtcatgttcaagttcagaacattttcttcgagtgctcttctgatgtatcttgccacacgagacctgagagatttcatgagtgtggagctcactgatgggcacataaaagtcagttacgatctgggctcaggaatggcttccgttgtcagcaatcaaaaccataatgatgggaaatggaaatcattcactctgtcaagaattcaaaaacaagccaatatatcaattgtagatatagatactaatcaggaggagaatatagcaacttcgtcttctggaaacaactttggtcttgacttgaaagcagatgacaaaatatattttggtggcctgccaacgctgagaaacttgagtatgaaagcaaggccagaagtaaatctgaagaaatattccggctgcctcaaagatattgaaatttcaagaactccgtacaatatactcagtagtcccgattatgttggtgttaccaaaggatgttccctggagaatgtttacacagttagctttcctaagcctggttttgtggagctctcccctgtgccaattgatgtaggaacagaaatcaacctgtcattcagcaccaagaatgagtccggcatcattcttttgggaagtggagggacaccagcaccacctaggagaaaacgaaggcagactggacaggcctattatgtaatactcctcaacaggggccgtctggaagtgcatctctccacaggggcacgaacaatgaggaaaattgtcatcagaccagagccgaatctgtttcatgatggaagagaacattccgttcatgtagagcgaactagaggcatctttacagttcaagtggatgaaaacagaagatacatgcaaaacctgacagttgaacagcctatcgaagttaaaaagcttttcgttgggggtgctccacctgaatttcaaccttccccactcagaaatattcctccttttgaaggctgcatatggaatcttgttattaactctgtccccatggactttgcaaggcctgtgtccttcaaaaatgctgacattggtcgctgtgcccatcagaaactccgtgaagatgaagatggagcagctccagctgaaatagttatccagcctgagccagttcccaccccagcctttcctacgcccaccccagttctgacacatggtccttgtgctgcagaatcagaaccagctcttttgatagggagcaagcagttcgggctttcaagaaacagtcacattgcaattgcatttgatgacaccaaagttaaaaaccgtctcacaattgagttggaagtaagaaccgaagctgaatccggcttgcttttttacatggctcgcatcaatcatgctgattttgcaacagttcagctgagaaatggattgccctacttcagctatgacttggggagtggggacacccacaccatgatccccaccaaaatcaatgatggccagtggcacaagattaagataatgagaagtaagcaagaaggaattctttatgtagatggggcttccaacagaaccatcagtcccaaaaaagccgacatcctggatgtcgtgggaatgctgtatgttggtgggttacccatcaactacactacccgaagaattggtccagtgacctatagcattgatggctgcgtcaggaatctccacatggcagaggcccctgccgatctggaacaacccacctccagcttccatgttgggacatgttttgcaaatgctcagaggggaacatattttgacggaaccggttttgccaaagcagttggtggattcaaagtgggattggaccttcttgtagaatttgaattccgcacaactacaacgactggagttcttctggggatcagtagtcaaaaaatggatggaatgggtattgaaatgattgatgaaaagttgatgtttcatgtggacaatggtgcgggcagattcactgctgtctatgatgctggggttccagggcatttgtgtgatggacaatggcataaagtcactgccaacaagatcaaacaccgcattgagctcacagtcgatgggaaccaggtggaagcccaaagcccaaacccagcatctacatcagctgacacaaatgaccctgtgtttgttggaggcttcccagatgacctcaagcagtttggcctaacaaccagtattccgttccgaggttgcatcagatccctgaagctcaccaaaggcacaggcaagccactggaggttaattttgccaaggccctggaactgaggggcgttcaacctgtatcatgcccagccaactaataaaaataagtgtaaccccaggaagagtctgtcaaaacaagtatatcaagtaaaacaaacaaatatattttacctatatatgttaattaaactaatttgtgcatgtacatagaattctttctgtattcagatggtgctaattcagactccagactgaattttaattcaagttctttctcaagtctataaatattaaactgattatttcattctaaaaaaaaaaaaaaaaaa

SEQ ID NO: 758 - DNA, 416 bp, Homo sapiens
aaggccatgttttatttgctgattaatggacaaaaggcaatgtaatttattttcaagtattttcttgaaagtctgtgctcataaaaatcatgaaaagttggaaagactgttaaatcactgaaacttcaaatatatcttacacaatcttgtttgtacaaaaatacaagttaaatataaacataaagcaatcatggtaattttatgcaaatctgttttatgtgatcatcagttatatataaaagtttctcagttctgttatttgtgaaaagatcaataccagattgaatgactacctattggcaaagggccctaaaaagcttactttaagcactcatcttttacatggttaaatgcatttcctaatttgagatcacctaaacactggaaaagaaaaaaaatgaaagggcagtatgtcc

SEQ ID NO: 759 - DNA, 500 bp, Homo sapiens
atcacagtggccacaaattctagagagcagaagaaaatattggccaaatatttgttagaaacttctggtaacttagatggtctggaatacaagttacatgattttggctacagaggagtctcttcccaagagactgctggcataggagcatctgctcacttggttaacttcaaaggaacagatacagtagcaggacttgctctaattaaaaaatattatggaacgaaagatcctgttccaggctattctgttccagcagcagaacacagtaccataacagcttgggggaaagaccatgaaaaagatgcttttgaacatattgtaacacagttttcatcagtgcctgtatctgtggtcagcgatactatggacatttataatgcgtgtgagaaaatatggggtgaagatctaagacatttaatagtatcgagaagtacacaggcaccactaataatcagacctgattctggaaaccctcttgacactgtgttaaaggtttc

SEQ ID NO: 760 - DNA, 2376 bp, Homo sapiens
cgcgcggcccctgtcctccggcccgagatgaatcctgcggcagaagccgagttcaacatcctcctggccaccgactcctacaaggttactcactataaacaatatccacccaacacaagcaaagtttattcctactttgaatgccgtgaaaagaagacagaaaactccaaattaaggaaggtgaaatatgaggaaacagtattttatgggttgcagtacattcttaataagtacttaaaaggtaaagtagtaaccaaagagaaaatccaggaagccaaagatgtctacaaagaacatttccaagatgatgtctttaatgaaaagggatggaactacattcttgagaagtatgatgggcatcttccaatagaaataaaagctgttcctgagggctttgtcattcccagaggaaatgttctcttcacggtggaaaacacagatccagagtgttactggcttacaaattggattgagactattcttgttcagtcctggtatccaatcacagtggccacaaattctagagagcagaagaaaatattggccaaatatttgttagaaacttctggtaacttagatggtctggaatacaagttacatgattttggctacagaggagtctcttcccaagagactgctggcataggagcatctgctcacttggttaacttcaaaggaacagatacagtagcaggacttgctctaattaaaaaatattatggaacgaaagatcctgttccaggctattctgttccagcagcagaacacagtaccataacagcttgggggaaagaccatgaaaaagatgcttttgaacatattgtaacacagttttcatcagtgcctgtatctgtggtcagcgatagctatgacatttataatgcgtgtgagaaaatatggggtgaagatctaagacatttaatagtatcgagaagtacacaggcaccactaataatcagacctgattctggaaaccctcttgacactgtgttaaaggttttggagattttaggtaagaagtttcctgttactgagaactcaaagggttacaagttgctgccaccttatcttagagttattcaaggggatggagtagatattaataccttacaagagattgtagaaggcatgaaacaaaaaatgtggagtattgaaaatattgccttcggttctggtggaggtttgctacagaagttgacaagagatctcttgaattgttccttcaagtgtagctatgttgtaactaatggccttgggattaacgtcttcaaggacccagttgctgatcccaacaaaaggtccaaaaagggccgattatctttacataggacgccagcagggaattttgttacactggaggaaggaaaaggagaccttgaggaatatggtcaggatcttctccatactgtcttcaagaatggcaaggtgacaaaaagctattcatttgatgaaataagaaaaaatgcacagctgaatattgaactggaagcagcacatcattaggctttatgactgggtgtgtgttgtgtgtatgtaatacataatgtttattgtacagatgtgtggggtttgtgttttatgatacattacagccaaattatttgttggtttatggacatactgccctttcattttttttcttttccagtgtttaggtgatctcaaattaggaaatgcatttaaccatgtaaaagatgagtgctaaagtaagctttttagggccctttgccaataggtagtcattcaatctggtattgatcttttcacaaataacagaactgagaaacttttatatataactgatgatcacataaaacagatttgcataaaattaccatgattgctttatgtttatatttaacttgtatttttgtacaaacaagattgtgtaagatatatttgaagtttcagtgatttaacagtctttccaacttttcatgatttttatgagcacagactttcaagaaaatacttgaaaataaattacattgccttttgtccattaatcagcaaataaaacatggccttaacaaagttgtttgtgttattgtacaatttgaaaattatgtcgggacataccctatagaattactaaccttactgccccttgtagaatatgtattaatcattctacattaaagaaaataatggttcttactggaatgtctaggcactgtacagttattatatatcttggttgttgtattgtaccagtgaaatgccaaatttgaaaggcctgtactgcaattttatatgtcagagattgcctgtggctctaatatgcacctcaagattttaaggagataatgtttttagagagaatttctgcttccactatagaatatatacataaatgtaaaatacttacaaaagtgg

SEQ ID NO: 761 - DNA, 556 bp, Homo sapiens
  modified_base (352)..(352): a, c, t or g
  modified_base (420)..(420): a, c, t or g
  modified_base (435)..(435): a, c, t or g
  modified_base (454)..(454): a, c, t or g
  modified_base (477)..(477): a, c, t or g
  modified_base (493)..(493): a, c, t or g
  modified_base (525)..(525): a, c, t or g
  modified_base (545)..(545): a, c, t or g
  modified_base (552)..(552): a, c, t or g
aagattttcaaaatatttttatatagaaattttttacaaagattttacaacatagcaaatcattatgtcatactgtagaaagatgaagcaaaggattaaactccaaggataaagaaagtgctcatagcaacgtattgcagtctccatgaaagtgcatataaacggttaaggcaaagtaccatcttggtacagacatgttgcaaactgacttttaaaacaattttttaaaatatatacaaactttttttcttctattcttctcaaaggcatttgaaagggatacttttatgaatattcttgctgtagaacaatgtagaaataacttctgggtataaaacagtaaaaataaaantattctacctgagtgtgtttaaatcaagtgatttggtaaaacaaaaccttcacaagtgtgggctttcnacatgtaacttgccnggctgaaggcttacacccnccatggttccacaacaccgatcnctaatggatgattacntgaggttaaaattgggggatcctggcccctcngtgtggccttttggccttcnagggtcnatgt

SEQ ID NO: 762 - DNA, 496 bp, Homo sapiens
  modified_base (416)..(416): a, c, t or g
  modified_base (432)..(432): a, c, t or g
  modified_base (485)..(485): a, c, t or g
attaatttcccttatgttgaggcatggaaaaaaaattggaaaagaaaaactcagtttaaatacggagactataatgataacactgaattcccctatttctcatgagtagatacaatcttacgtaaaagagtggttagtcacgtgaattcagttatcatttgacagattcttatctgtactagaattcagatatgtcagttttctgcaaaactcactcttgttcaagactagctaatttatttttttgcatcttagttatttttaaaaacaaattcttcaagtatgaagactaaatttagataactaatattatccttattgatcctattgatcttaaggtatttacatgtatgtggaaaaacaaaacacttaactagaattctctaataagggtttatggtttagcttaaagagcncccttggtatttttanttatcagatgggggccaccatattggtatggaaggcatatgtagccccttccncagcatgggtt

SEQ ID NO: 763 - DNA, 3460 bp, Homo sapiens
agcgggacgcccgggcggccctgaaggggacggggcggccccagtcggaggtcgcagggagctccgcccccgactcggtataagagctgggcccggcccacggcggcggcggcggcggcggagagagctggctcagggcgtccgctaggctcggacgacctgctgagcctcccaaaccgcttccataaggctttgcctttccaacttcagctacagtgttagctaagtttggaaagaaggaaaaaagaaaatccctgggccccttttcttttgttctttgccaaagtcgtcgttgtagtctttttgcccaaggctgttgtgtttttagaggtcctatctccagttccttgcactcctgttaacaagcacctcagcgagagcagcagcagcgatagcagccgcagaagagccagcggggtcgcgtagtgtcatgaccagggcgggagatcacaaccgccagagaggatgctgtggatccttggccgactacctgacctctgcaaaattccttctctaccttggtcattctctctctacttggggagatcggatgtggcactttgcggtgtctgtgtttctggtagagctctatggaaacagcctccttttgacagcagtctacgggctggtggtggcagggtctgttctggtcctgggagccatcatcggtgactgggtggacaagaatgctagacttaaagtggcccagacctcgctggtggtacagaatgtttcagtcatcctgtgtggaatcatcctgatgatggttttcttacataaacatgagcttctgaccatgtaccatggatgggttctcacttcctgctatatcctgatcatcactattgcaaatattgcaaatttggccagtactgctactgcaatcacaatccaaagggattggattgttgttgttgcaggagaagacagaagcaaactagcaaatatgaatgccacaatacgaaggattgaccagttaaccaacatcttagcccccatggctgttggccagattatgacatttggctccccagtcatcggctgtggctttatttcgggatggaacttggtatccatgtgcgtggagtacgttctgctctggaaggtttaccagaaaaccccagctctagctgtgaaagctggtcttaaagaagaggaaactgaattgaaacagctgaatttacacaaagatactgagccaaaacccctggagggaactcatctaatgggtgtgaaagactctaacatccatgagcttgaacatgagcaagagcctacttgtgcctcccagatggctgagcccttccgtaccttccgagatggatgggtctcctactacaaccagcctgtgtttctggctggcatgggtcttgctttcctttatatgactgtcctgggctttgactgcatcaccacagggtacgcctacactcagggactgagtggttccatcctcagtattttgatgggagcatcagctataactggaataatgggaactgtagcttttacttggctacgtcgaaaatgtggtttggttcggacaggtctgatctcaggattggcacagctttcctgtttgatcttgtgtgtgatctctgtattcatgcctggaagccccctggacttgtccgtttctccttttgaagatatccgatcaaggttcattcaaggagagtcaattacacctaccaagatacctgaaattacaactgaaatatacatgtctaatgggtctaattctgctaatattgtcccggagacaagtcctgaatctgtgcccataatctctgtcagtctgctgtttgcaggcgtcattgctgctagaatcggtctttggtcctttgatttaactgtgacacagttgctgcaagaaaatgtaattgaatctgaaagaggcattataaatggtgtacagaactccatgaactatcttcttgatcttctgcatttcatcatggtcatcctggctccaaatcctgaagcttttggcttgctcgtattgatttcagtctcctttgtggcaatgggccacattatgtatttccgatttgcccaaaatactctgggaaacaagctctttgcttgcggtcctgatgcaaaagaagttaggaaggaaaatcaagcaaatacatctgttgtttgagacagtttaactgttgctatcctgttactagattatatagagcacatgtgcttattttgtactgcagaattccaataaatggctgggtgttttgctctgtttttaccacagctgtgccttgagaactaaaagctgtttaggaaacctaagtcagcagaaattaactgattaatttcccttatgttgaggcatggaaaaaaaattggaaaagaaaaactcagtttaaatacggagactataatgataacactgaattcccctatttctcatgagtagatacaatcttacgtaaaagagtggttagtcacgtgaattcagttatcatttgacagattcttatctgtactagaattcagatatgtcagttttctgcaaaactcactcttgttcaagactagctaatttatttttttgcatcttagttatttttaaaaacaaattcttcaagtatgaagactaaattttgataactaatattatccttattgatcctattgatcttaaggtatttacatgtatgtggaaaaacaaaacacttaactagaattctctaataaggtttatggtttagcttaaagagcacctttgtatttttattatcagatggggcaacatattgtatgaagcatatgtagcacttcacagcatggttatcatgtaagctgcaggtagaagcaaagctgtaaagtagatttatcacacaatgactgcatacagacttcaaatatgtcaatagtttggtcatagaacctagaagccaaaagccacacagaagggcaagaatcccaatttaactcatgttatcatcattagtgatctgtgttgtagaacatgagggtgtaagccttcagcctggcaagttacatgtagaaagcccacacttgtgaaggttttgttttacaaatcacttgatttaacacactcaggtagaatatttttatttttactgttttatacccagaagttatttctacattgttctacagcaagaatattcataaaagtatccctttcaaatgcctttgagaagaatagaagaaaaaaagtttgtatatattttaaaaaattgttttaaaagtcagtttgcaacatgtctgtaccaagatggtactttgccttaaccgtttatatgcactttcatggagactgcaatacgttgctatgagcactttctttatccttggagtttaatcctttgcttcatctttctacagtatgacataatgatttgctatgttgtaaaatctttgtaaaaaatttctatataaaaatattttgaaaatcttaaaaaaaaaaaaaaaaaaaaaaaaaaaa

SEQ ID NO: 764 - DNA, 483 bp, Homo sapiens
  modified_base (79)..(79): a, c, t or g
  modified_base (103)..(103): a, c, t or g
  modified_base (110)..(110): a, c, t or g
  modified_base (135)..(135): a, c, t or g
  modified_base (184)..(184): a, c, t or g
  modified_base (229)..(229): a, c, t or g
  modified_base (274)..(274): a, c, t or g
  modified_base (326)..(326): a, c, t or g
  modified_base (430)..(430): a, c, t or g
  modified_base (473)..(473): a, c, t or g
tttttttttttggtcccaccaggaccatttaatttctctgtaagggtaagatgacacaaaagagcccaactatggcaancggtgaggtgggagttctgaaccnatttagnctgtttctcagggccgcacagggtnttgacggtggttttcatctgccacctccctccttgagacccagactggncctgagtgtgcacgaaatgggaccttctccttgggtccaccaggnctgggaggcacccctaggtacccgctcctcatcacagacgggcancctctcggttccacatctggttctcctgacgaagccgctggttttcggtccngagcctctggacctcggcagccagctcctccacctggcggcaggactgcttgccggtgcaacgcctgcagctgctgcagcctcctagtctcctcctccgcctgnacaccgctttctcagctccagggagtttcgaccagtcttcttnctgcggccct

SEQ ID NO: 765 - DNA, 604 bp, Homo sapiens
  modified_base (1)..(1): a, c, t or g
  modified_base (37)..(37): a, c, t or g
  modified_base (41)..(41): a, c, t or g
  modified_base (49)..(49): a, c, t or g
  modified_base (63)..(63): a, c, t or g
  modified_base (83)..(83): a, c, t or g
  modified_base (95)..(95): a, c, t or g
  modified_base (448)..(448): a, c, t or g
  modified_base (468)..(468): a, c, t or g
  modified_base (482)..(482): a, c, t or g
  modified_base (532)..(532): a, c, t or g
  modified_base (550)..(550): a, c, t or g
  modified_base (561)..(561): a, c, t or g
  modified_base (567)..(567): a, c, t or g
  modified_base (591)..(591): a, c, t or g
  modified_base (598)..(598): a, c, t or g
naggacagtacaggacatgagtccggtgagggacccnaggnaggcaggnacagagaagacggncccctgaatgcccatttggnccccttgctggnctggaggtgtgaaaaccagcgtggaggcagccttcggggcctgcatttgagaataagggtgtcactagttccaggcgtctgctgaaagatttggaacagaagatgatggccactccgaaccagaccgcctgtaatgcagagtcaccagtggccctggaggaggccaagacctctggtgccccggggagcccccaaacaccccctgagcgtcatgactctggtggttccctgcccctgacaccgcggatggagagccactcagaggatgaagatcttgctggggctgtcggtggcctgggcttgaacagtaggagtccccggacccagagcccagggcttgctcagcggaggtntgcttgcccggaagaaacancgtcggcggccatngaagcgcaaaaggcacttgcgaccctaccttgagcttaacttggttaganacaacaacgggattagangaaacagaggncttccnggtcccgaagaatttttgcaaaancaacccnttcccc

SEQ ID NO: 766 - DNA, 1330 bp, Homo sapiens
ggtttttcgcaacccgggcggcgagatggcgctttggtgtaagcgaggaggacagtacaggacatgagtcctggtgagggacccgaggagcaggacagagaagacggcccctgaatcccatttggccccttgctggctggaggtgtgaaaaccagcggtggaggcagccttcggggcctgcatttgagaataagggtgtcactagttccaggcgtctgctgaaagatttggaacagaagatgatggccactccgaaccagaccgcctgtaatgcagagtcaccagtggccctggaggaggccaagacctctggtgccccggggagcccccaaacaccccctgagcgtcatgactctggtggttccctgcccctgacaccgcggatggagagccactcagaggatgaagatcttgctggggctgtcggtggcctgggctggaacagtaggagtccccggacccagagcccagggggctgctcagcggaggctgtgctggcccggaagaaacaccgtcggcggccatcgaagcgcaaaaggcactggcgaccctacctggagctgagctgggctgagaaacaacagcgggatgagaggcagagccagagggcctcccgggtccgcgaagagatgttcgccaaaggccagcccgtggccccctacaacaccacccagttcctgatgaatgacagggacccggaggagcccaacttggatgtgccccatgggatctcccacccaggttccagtggggagagtgaggccggggacagtgatgggcggggccgagcgcacggtgagttccagcggaaggacttctctgagacttacgaacgcttccacaccgagagcctgcagggccgcagcaagcaggagctggtgcgagactacctggagctggagaagcggctgtcgcaggcggaggaggagactaggaggctgcagcagctgcaggcgtgcaccggccagcagtcctgccgccaggtggaggagctggctgccgaggtccagaggctccggaccgaaaaccagcggcttcgtcaggagaaccagatgtggaaccgagagggctgccgctgtgatgaggagccgggtacctaggggtgcctcccagcctggtggacccaaggagaaggtcccatttcgtgcacactcaggccagctgggtctcaaggaggcaggtggcagatgaaaaccaccgtcaacaccctgtgcgccctgagaacagctaaatcggttcagactcccacctcaccgtttccatagttggctcttttgtgtcatcttaccctttacagagaaattaaatggccttggtgggaccaaatggg

SEQ ID NO: 767 - DNA, 377 bp, Homo sapiens
  modified_base (88)..(88): a, c, t or g
  modified_base (334)..(334): a, c, t or g
  modified_base (347)..(347): a, c, t or g
  modified_base (353)..(353): a, c, t or g
  modified_base (361)..(361): a, c, t or g
gtgtacatatttacatttatttacaaaagtatctacatcatcagtaaaaacaatttactgacaaaaaaagcaagcacctagtcatatnataagttgatgacagccaaaactaatgcttgttctttgttagtgggtatttcttcttaaagcagctgcttcaagttacatttccaacagttgttcaaaaattgtaatactcaaatgagaaatcagatggctttttagtttttaaaataatttagttatgctgttgtcttcatcttctgttaccaatcaattggagttgggttctgtctggttttctgtcacatttcagaataccattcatataccngcaccaatacatngttggnaaattacnggctaatgggtatggg

SEQ ID NO: 768 - DNA, 460 bp, Homo sapiens
  modified_base (10)..(10): a, c, t or g
  modified_base (14)..(14): a, c, t or g
  modified_base (32)..(32): a, c, t or g
  modified_base (95)..(95): a, c, t or g
  modified_base (386)..(386): a, c, t or g
  modified_base (433)..(433): a, c, t or g
cgacgagcantggnttgctgggagcgacgcgnggcgggccctgggggtcctcagcgtggtctgcctgctgcactgctttggtttcatcagctgtntttcccaacaaatatatggtgttgtgtatgggaatgtaactttccatgtaccaagcaatgtgcctttaaaagaggtcctatggaaaaaacaaaaggataaagttgcagaactggaaaattctgaattccagagctttctcatcttttaaaaatagggtttatttagacactgtgtcaggtagccctcactatctacaacttaaacatcatcaagatgaaagatgaagtatgaaatggaatcggccaaaatagttactgatcaccatgaagttccttccttatgtgccttgnagtctctttccaatctcccacactaacttggtgcattgactaatggnagcattgaagtccaatgcatgataccc

SEQ ID NO: 769 - DNA, 1040 bp, Homo sapiens
cgacgagccatggttgctgggagcgacgcggggcgggccctgggggtcctcagcgtggtctgcctgctgcactgctttggtttcatcagctgtttttcccaacaaatatatggtgttgtgtatgggaatgtaactttccatgtaccaagcaatgtgcctttaaaagaggtcctatggaaaaaacaaaaggataaagttgcagaactggaaaattctgaattcagagctttctcatcttttaaaaatagggtttatttagacactgtgtcaggtagcctcactatctacaacttaacatcatcagatgaagatgagtatgaaatggaatcgccaaatattactgataccatgaagttctttctttatgtgcttgagtctcttccatctcccacactaacttgtgcattgactaatggaagcattgaagtccaatgcatgataccagagcattacaacagccatcgaggacttataatgtactcatgggattgtcctatggagcaatgtaaacgtaactcaaccagtatatattttaagatggaaaatgatcttccacaaaaaatacagtgtactcttagcaatccattatttaatacaacatcatcaatcattttgacaacctgtatcccaagcagcggtcattcaagacacagatatgcacttatacccataccattagcagtaattacaacatgtattgtgctgtatatgaatggtattctgaaatgtgacagaaaaccagacagaaccaactccaattgattggtaacagaagatgaagacaacagcataactaaattattttaaaaactaaaaagccatctgatttctcatttgagtattacaatttttgaacaactgttggaaatgtaacttgaagcagctgctttaagaagaaatacccactaacaaagaacaagcattagttttggctgtcatcaacttattatatgactaggtgcttgctttttttgtcagtaaattgtttttactgatgatgtagatacttttgtaaataaatgtaaatatgtacacaagtg

SEQ ID NO: 770 - DNA, 306 bp, Homo sapiens
  modified_base (200)..(200): a, c, t or g
  modified_base (261)..(261): a, c, t or g
  modified_base (269)..(269): a, c, t or g
  modified_base (287)..(287): a, c, t or g
  modified_base (289)..(289): a, c, t or g
  modified_base (292)..(292): a, c, t or g
  modified_base (295)..(295): a, c, t or g
  modified_base (302)..(302): a, c, t or g
gctgccaaaagcctttaatatgccctggtcccaggctgtgttcatgaaagcggacacagcagtgcttccagcttcatggttcccaggttcaggttcctcccagcggaggtgggagggcagccctcacacctggcacccctgagtgcatactcctggaggaagtcgttgagctgggcacaggctgcccgctggcggttgcntccggcacaggcgttcagagggcatctcctcgatccagctattcgagtccagcaagtactngggggggnccctcccaggggcataantnggnccntccaganccat

SEQ ID NO: 771 - DNA, 449 bp, Homo sapiens
  modified_base (2)..(2): a, c, t or g
  modified_base (297)..(297): a, c, t or g
  modified_base (432)..(432): a, c, t or g
  modified_base (446)..(446): a, c, t or g
antagaagtgacagtcaaaggccacgtcgagtacacgatggaagcaaacgaggactatgaggactatgagtacgatgagcttccagccaaggatgacccagatgcccctctgcagcccgtgacacccctgcagctgtttgagggtcggaggaaccgccgcagagggaggcgcccaaggtggtggaggagcaggagtccagggtgcactacaccgtgtgcatctggcggaacggcaaggtggggctgtctggcatggcatcgcggacgtcaccctcctgagtggattccacgccctgntgcttgaccttggagaagctgacctccctctctgaccgttacgtgagtcacttttgagacccgaaggggccccaacgttcttgcttgtaattttgaacttcggtccccaacttccccgggaagttgccttgggcnttttaaggcttgtncaa

SEQ ID NO: 772 - DNA, 455 bp, Homo sapiens
  modified_base (53)..(53): a, c, t or g
  modified_base (55)..(56): a, c, t or g
  modified_base (59)..(100): a, c, t or g
  modified_base (103)..(103): a, c, t or g
  modified_base (105)..(105): a, c, t or g
  modified_base (387)..(387): a, c, t or g
  modified_base (437)..(437): a, c, t or g
tttttttttttctgacacgagacataaaaacttttaatgaaggaggacacagntnngtnnnnnnnnnnnnnnnnnnnnnnnnnnnnnnnnnnnnnnnnnnatngnaaccgctcaatcagaaggtgttcttgatgcggccggccaccagcctaaggatgtccccgatcttcttctgccagttggcgatgtccttggacacggcgcaccacagctccccatgccgaggctctgcactctcacagcgcttcctcacctcctcctgctgctcctcagtgccatgctgcagctcaaacttgtagaagaaggcccaggcatcccccaggtccgagtcaatcttcacagtgcggtggaaccactccctgggccttggtgatcttccgctgactncaaaacagcttggccacggcagggagcacatgggggtcatgttcacattnttcaggggattcacgttt

SEQ ID NO: 773 - DNA, 260 bp, Homo sapiens
  modified_base (18)..(18): a, c, t or g
  modified_base (24)..(24): a, c, t or g
  modified_base (54)..(54): a, c, t or g
  modified_base (145)..(145): a, c, t or g
  modified_base (178)..(178): a, c, t or g
  modified_base (217)..(217): a, c, t or g
  modified_base (223)..(223): a, c, t or g
  modified_base (256)..(256): a, c, t or g
atgtacgcctacgccctncaggtnttccccagcaagaagagtgtgtggctgcgngccggtaacttgcgagaagaaccatggcactcgggagtccctggaagcactcctgcagagggctgtggccacctgccccaaagcagaggtnctgtggctcatgggcgccaagtccaagtggctngcaggggatgtgcctgcagcaaggagcatcctggccctngcttancaggcaacccccaacagtgaggagatctggctngcag

SEQ ID NO: 774 - DNA, 3106 bp, Homo sapiens
tctgcttccggggcgcgggtgacgcgacgacggcgacactttgctacggagtgcatcggacgtcgaagcctagagtctctgcgtctttccctcttccgctgcctcattcctttccttcctagccttggtcgtcgccgccaccatgaacaagaagaagaaaccgttcctagggatgcccgcgcccctcggctacgtgccggggctgggccggggcgccactggcttcaccacgcggtcagacattgggcccgcccgtgatgcaaatgaccctgtggatgatcgccatgcacccccaggcaagagaaccgttggggaccagatgaagaaaaatcaggctgctgacgatgacgacgaggatctaaatgacaccaattacgatgagtttaatggctatgctgggagcctcttctcaagtggaccctacgagaaagatgatgaggaagcagatgctatctatgcagccctggataaaaggatggatgaaagaagaaaagaaagacgggagcaaagggagaaagaagaaatagagaaatatcgtatggaacgccccaaaatccaacagcagttctcagacctcaagaggaagttggcagaagtcacagaagaagagtggctgagcatccccgaggttggcgatgccagaaataaacgtcagcggaacccacgctatgagaagctgacccctgttcctgacagtttctttgccaaacatttacagaccggagagaaccatacctcagtggatccccgacaaactcaatttggaggtcttaacacaccctatccaggtggactaaacactccatacccaggtggaatgacgccaggactgatgacacctggcacaggtgagctggacatgaggaagattggccaagcgaggaacactctgatggacatgaggctgagccaggtgtctgactccgtgagtggacagaccgtcgttgaccccaaaggctacctgacggatttaaattccatgatcccgacacacggaggagacatcaatgatatcaagaaggcgcgactgctcctcaagtctgttcgggagacgaaccctcatcacccgccagcctggattgcatcagcccgcctggaagaagtcactgggaagctacaagtagctcggaaccttatcatgaaggggacggagatgtgccccaagagtgaagatgtctggctggaagcagccaggttgcagcctggggacacagccaaggccgtggtagcccaagctgtccgtcatctcccacagtctgtcaggatttacatcagagccgcagagctggaaacggacattcgtgcaaagaagcgggttcttcggaaagccctcgagcatgttccaaactcggttcgcttgtggaaagcagccgttgagctggaagaacctgaagatgctagaatcatgctgagccgagctgtggagtgctgccccaccagcgtggagctctggcttgctctggcaaggctggagacctatgaaaatgcccgcaaggtcttgaacaaggcgcgggagaacattcctacagaccgacatatctggatcacggctgctaagctggaggaagccaatgggaacacgcagatggtggagaagatcatcgaccgagccatcacctcgctgcgggccaacggtgtggagatcaaccgtgagcagtggatccaggatgccgaggaatgtgacagggctgggagtgtggccacctgccaggccgtcatgcgtgccgtgattgggattgggattgaggaggaagatcggaagcatacctggatggaggatgctgacagttgtgtagcccacaatgccctggagtgtgcacgagccatctacgcctacgccctgcaggtgttccccagcaagaagagtgtgtggctgcgcgccgcgtacttcgagaagaaccatggcactcgggagtccctggaagcactcctgcagagggctgtggcccactgccccaaagcagaggtgctgtggctcatgggcgccaagtccaagtggctggcaggggatgtgcctgcagcaaggagcatcctggccctggccttccaggccaaccccaacagtgaggagatctggctggcagccgtgaagctggagtccgagaatgatgagtacgagcgggcccggaggctgctggccaaggcgcggagcagtgcccccaccgcccgggtgttcatgaagtctgtgaagctggagtgggtgcaagacaacatcagggcagcccaagatctgtgcgaggaggccctgcggcactatgaggacttccccaagctgtggatgatgaaggggcagatcgaggagcagaaggagatgatggagaaggcgcgggaagcctataaccaggggttgaagaagtgtccccactccacacccctgtggcttttgctctctcggctggaggagaagattgggcagcttactcgagcacgggccattttggaaaagtctcgtctgaagaacccaaagaaccctgggctgtggttggagtccgtgcggctggagtaccgtgcggggctgaagaacatcgcaaatacactcatggccaaggcgctgcaggagtgccccaactccggtatcctgtggtctgaggccatcttcctcgaggcaaggccccagaggaggaccaagagcgtggatgccctgaagaagtgtgagcatgacccccatgtgctcctggccgtggccaagctgttttggagtcagcggaagatcaccaaggccagggagtggttccaccgcactgtgaagattgactcggacctgggggatgcctgggccttcttctacaagtttgagctgcagcatggcactgaggagcagcaggaggaggtgaggaagcgctgtgagagtgcagagcctcggcatggggagctgtggtgcgccgtgtccaaggacatcgccaactggcagaagaagatcggggacatccttaggctggtggccggccgcatcaagaacaccttctgattgagcggttgccatggccggtctccgtggggcagggttgggccgcatgtggaagggctctgagctgtgtcctccttcattaaaagtttttatgtctcgtgtcagaaaaaaaaaaaaaaaaaaaaaaaaaaaaaaaaa

SEQ ID NO: 775 - DNA, 501 bp, Homo sapiens
  modified_base (14)..(14): a, c, t or g
tttttttttttttnaagtttaattcaattttattttcccttttagtatttttcaaattatacaacatgcagtctgccagagtacccatacatcttcattttagaacctagaagattaccaaaattttccgtgggccagaggagggtgacttccagatcttttgttacatggactatagtacagcatcgttattgatataaaccaccattctcccctcaaaccccccggacaagtttgtccacaatttttttaatgtgaaagctactgtacagatacataaagcccagagaacacacatctgcagtacacaggacacactttacaaactagacatgtataattctacagaatgccctattccccttatatctgcacacaatgaacagtatttaaaactgatacacaatttttaaataagtaagcagacttcatggagcggcgcttacttcggcagttatccagccattattcaatgcttggtttaaaaagtctaaattgtta

SEQ ID NO: 776 - DNA, 482 bp, Homo sapiens
  modified_base (219)..(219): a, c, t or g
  modified_base (268)..(268): a, c, t or g
  modified_base (390)..(390): a, c, t or g
  modified_base (427)..(427): a, c, t or g
  modified_base (445)..(445): a, c, t or g
  modified_base (460)..(460): a, c, t or g
  modified_base (470)..(470): a, c, t or g
  modified_base (476)..(476): a, c, t or g
tttttttttttttttgcctgtattgaagttttattttttttctatacacgtgattgattaacaatataattaatgggatgtcattttataccctgacaagtttaaatgtaaataaattggcaccacctttaatcagactgatgtcctgacttgcacaggaaacacgcacctaacctcaccaacctcaaggccctccctcctcaagtctccatgcaaagnactgtgccagtcagagtggagctgtccccccgacgagcccccaggaagncacccggccggccatggctgttcattttgagggtggaaaataactgggatttctggttaattgggtgacatcctcaaggagctgtgggcaagccatgttcttcgggccgcgtgttggggggnagtacatgggtggggtcctgaacgggccttgtttttncaccaagtgtttcctaanttttcaggcaaattngggggtttcnagaccntcttgg

SEQ ID NO: 777 - DNA, 439 bp, Homo sapiens
  modified_base (21)..(21): a, c, t or g
  modified_base (254)..(254): a, c, t or g
  modified_base (385)..(385): a, c, t or g
  modified_base (412)..(412): a, c, t or g
cttctgcgggaagtgccctgnccacccgggctttgagggctcagcgtgccagtgcgagaggaccactgagggctgcctgaacccgcggcgtgttgagtgtagtggtcgtggccggtgccgctgcaacgtatgcgagtgccattcaggctaccagctgcctctgtgccaggagtgccccggctgcccctcaccctgtggcaagtacatctcctgcgccgagtgcctgaagttcgaaaagggcccctttggtaagnaactgcagcgggcgtgtccggcctgcagctgtcgaacaaccccgtgaagggcaggacctgcaagagagggattcagagggctgctgggtggcctacacgctggagcagcaggacgggatgggaccgttacntcatctatgtgggatgagagccgagantgttttgggcaggccccaacatcgccg

SEQ ID NO: 778 - DNA, 2776 bp, Homo sapiens
cagggcagactggtagcaaagcccccacgcccagccaggagcaccgccgcggactccagcacaccgagggacatgctgggcctgcgccccccactgctcgccctggtggggctgctctccctcgggtgcgtcctctctcaggagtgcacgaagttcaaggtcagcagctgccgggaatgcatcgagtcggggcccggctgcacctggtgccagaagctgaacttcacagggccgggggatcctgactccattcgctgcgacacccggccacagctgctcatgaggggctgtgcggctgacgacatcatggaccccacaagcctcgctgaaacccaggaagaccacaatgggggccagaagcagctgtccccacaaaaagtgacgctttacctgcgaccaggccaggcagcagcgttcaacgtgaccttccggcgggccaagggctaccccatcgacctgtactatctgatggacctctcctactccatgcttgatgacctcaggaatgtcaagaagctaggtggcgacctgctccgggccctcaacgagatcaccgagtccggccgcattggcttcgggtccttcgtggacaagaccgtgctgccgttcgtgaacacgcaccctgataagctgcgaaacccatgccccaacaaggagaaagagtgccagcccccgtttgccttcaggcacgtgctgaagctgaccaacaactccaaccagtttcagaccgaggtcgggaagcagctgatttccggaaacctggatgcacccgagggtgggctggacgccatgatgcaggtcgccgcctgcccggaggaaatcggctggcgcaacgtcacgcggctgctggtgtttgccactgatgacggcttccatttcgcgggcgacggaaagctgggcgccatcctgacccccaacgacggccgctgtcacctggaggacaacttgtacaagaggagcaacgaattcgactacccatcggtgggccagctggcgcacaagctggctgaaaacaacatccagcccatcttcgcggtgaccagtaggatggtgaagacctacgagaaactcaccgagatcatccccaagtcagccgtgggggagctgtctgaggactccagcaatgtggtccatctcattaagaatgcttacaataaactctcctccagggtcttcctggatcacaacgccctccccgacaccctgaaagtcacctacgactccttctgcagcaatggagtgacgcacaggaaccagcccagaggtgactgtgatggcgtgcagatcaatgtcccgatcaccttccaggtgaaggtcacggccacagagtgcatccaggagcagtcgtttgtcatccgggcgctgggcttcacggacatagtgaccgtgcaggttcttccccagtgtgagtgccggtgccgggaccagagcagagaccgcagcctctgccatggcaagggcttcttggagtgcggcatctgcaggtgtgacactggctacattgggaaaaactgtgagtgccagacacagggccggagcagccaggagctggaaggaagctgccggaaggacaacaactccatcatctgctcagggctgggggactgtgtctgcgggcagtgcctgtgccacaccagcgacgtccccggcaagctgatatacgggcagtactgcgagtgtgacaccatcaactgtgagcgctacaacggccaggtctgcggcggcccggggagggggctctgcttctgcgggaagtgccgctgccacccgggctttgagggctcagcgtgccagtgcgagaggaccactgagggctgcctgaacccgcggcgtgttgagtgtagtggtcgtggccggtgccgctgcaacgtatgcgagtgccattcaggctaccagctgcctctgtgccaggagtgccccggctgcccctcaccctgtggcaagtacatctcctgcgccgagtgcctgaagttcgaaaagggcccctttgggaagaactgcagcgcggcgtgtccgggcctgcagctgtcgaacaaccccgtgaagggcaggacctgcaaggagagggactcagagggctgctgggtggcctacacgctggagcagcaggacgggatggaccgctacctcatctatgtggatgagagccgagagtgtgtggcaggccccaacatcgccgccatcgtcgggggcaccgtggcaggcatcgtgctgatcggcattctcctgctggtcatctggaaggctctgatccacctgagcgacctccgggagtacaggcgctttgagaaggagaagctcaagtcccagtggaacaatgataatccccttttcaagagcgccaccacgacggtcatgaaccccaagtttgctgagagttaggagcacttggtgaagacaaggccgtcaggacccaccatgtctgccccatcacgcggccgagacatggcttggccacagctcttgaggatgtcaccaattaaccagaaatccagttattttccgccctcaaaatgacagccatggccggccggtgcttctgggggctcgtcggggggacagctccactctgactggcacagtctttgcatggagacttgaggagggcttgaggttggtgaggttaggtgcgtgtttcctgtgcaagtcaggacatcagtctgattaaaggtggtgccaatttatttacatttaaacttgtcagggtataaaatgacatcccattaattatattgttaatcaatcacgtgtatagaaaaaaaaataaaacttcaat

SEQ ID NO: 779 - DNA, 511 bp, Homo sapiens
  modified_base (56)..(56): a, c, t or g
  modified_base (310)..(310): a, c, t or g
tttttttttttttttttccatgttcatttttatttaaagactgcagaaacacaggncatcatggtttgtcatcactgacaagtcttccaaaatcacacgttgacatttgtgttctaacaaaaacacttgggatagggtgtgtgtgtttgtgtgtgtgaactgtgcaaagtacaaaggatctcccagtcggctgagcctgttttgaagtgcccggcctggcatcaccccatgaggatgccaggagagcacccgtggccgccatcctctctgcctccctctgggcagaggcccctggtggcctgcagtcctntcccctcggtgtccactgacttcagccatggctgtggactctaccatgctcctcaaaggaaatctctgtggccccccaaggccactacatggctaagatgtgtacatcatggggccaggatgaaacataagggttagtttatcttaaccgccaaacatgtgtaccctttgaggcaagatggcttaagaaagggtaatttgc

SEQ ID NO: 780 - DNA, 512 bp, Homo sapiens
  modified_base (87)..(87): a, c, t or g
  modified_base (381)..(381): a, c, t or g
  modified_base (449)..(449): a, c, t or g
  modified_base (479)..(479): a, c, t or g
  modified_base (486)..(486): a, c, t or g
  modified_base (503)..(503): a, c, t or g
actttgaaacacgggccacttattttcagagttccgttttgggacgtgacttggctacttgttacttccaggtggttaccacacggngggggtcatgcctttccctcccccaagatgataatagatttaatagactcaaagaagttgttcagaatcaaagaagaaaaagtctgggcttaaacatagtaacttctgtgtgccagttaatgacaaccaaaagctctctatttaccattattgccaaacttcatcagttgcccatcctgcaccaaaatcctgtgcgtgtttaaattcacgttgtcaccaaagaggtgcacagatcaacaacctggatgacgcaggtgttctccagggaaaccagaccaagtcaagtcttcaggnaacttttttgaagtttttttttaaggcgcgcaggtaccaagcaacagatagagtacctgaacgttctnctttccaggatggcccacgtgtctttaggnggaattnttacctctgtggggcangcacagccc

SEQ ID NO: 781 - DNA, 426 bp, Homo sapiens
  modified_base (198)..(198): a, c, t or g
  modified_base (201)..(201): a, c, t or g
tttttttttggcacagaataagcaatttattgcaattgaattatccaatgtggttgactgaatataaatatttttattacaaaatattccaggtaaaaattcggagctgcttacaagcttctttagctttaagctcattgcatttcttcatgtctagagcatgggtgacgggctcaggtgtgcctggcctgccccgcngtncctccttctccgtctgcagtgggtcccactcagtgaggacctctgaggacacctcagtgaacagatggtcccagtcccagccgacatcatcctgccaagaagggtttcgctgggtaagacaaagaaaggccttttcccttaactgtagctgacttctccctcccatccagggcctcagggaggcacaggccagcccgggagtcggcttggttatggggatgccag

SEQ ID NO: 782 - DNA, 529 bp, Homo sapiens
  modified_base (460)..(460): a, c, t or g
  modified_base (493)..(493): a, c, t or g
  modified_base (506)..(506): a, c, t or g
  modified_base (525)..(525): a, c, t or g
tgattacattagacctggcaaatggacgcctggatcccagggagtcaggctatgtcattagatggaagatgcccttgagatgcaggctgagggccctgatgattgcactgcggggctaatgcacatagagatctgggtcatgaggagtggcactcactgcggcatccctttgtgacactacatgttctcagttcctctgtctctgaccatgccaggctcacttgtcagttcctcttctttcctctaataagccctttgttacatttatttctttacatttctccttggagatccactgcagtggctttctaacctgttgcacgcgtcagaatcaccaaggaacgcctggggaaaaaaatctgggatgcttgagcgtgacccagggaggttctatctcagcaggttctgggaatgaggcctgggggtttcagacatcctttgaaactccacctttgatccnaaccctagtttgtatctgagtgttccttcctgncccagcccacagncccatggttggtgtttttnaagg

SEQ ID NO: 783 - DNA, 850 bp, Homo sapiens
cggagatggaggatttgctcgacttggacgaggagcttcgctacagcttggctacctccagggccaagatgggtcgccgagctcaacaggagtcagcgcaggccgagaatcacctcaatggcaagaattcctctttgactctgactggagagacttcctctgctaaattacctcgctgccgacagggaggctgggcaggtgattccgtgaaggcttcgaacggtacccaaacaggcaaacaacagctggatctgaacgcatgctatcacaaaacgcatcacagaaatttggggctggcttcattggaagaggcagatattcctatcattccggatctggaggaagtacaggaagaagactttgttttgcaggtggcagcccctcccagcatccagataaagcgggtgatgacctaccgtgacctggacaatgacctcatgaagtactcagccattcagacactggatggggagatcgacctgaaactcctcaccaaagtgctcgcgccggagcacgaagtccgggaggatgatgtcggctgggactgggaccatctgttcactgaggtgtcctcagaggtcctcactgagtgggacccactgcagacggagaaggaggaccctgcggggcaggccaggcacacctgagcccgtcacccatgctctagacatgaagaaatgcaatgagcttaaagctaaagaagcttgtaagcagctccgaatttttacctggaatattttgtaataaaaatatttatattcagtcaaccacattggataattcaattgcaataaattgcttattctgtgccatctcaaaaaaaaaaaaaaaaaaaaaaaaaaaaaaaaaa

SEQ ID NO: 784 - DNA, 531 bp, Homo sapiens
  modified_base (298)..(298): a, c, t or g
  modified_base (367)..(367): a, c, t or g
  modified_base (381)..(381): a, c, t or g
  modified_base (439)..(439): a, c, t or g
  modified_base (468)..(468): a, c, t or g
  modified_base (483)..(483): a, c, t or g
  modified_base (505)..(505): a, c, t or g
  modified_base (510)..(510): a, c, t or g
  modified_base (520)..(520): a, c, t or g
  modified_base (527)..(527): a, c, t or g
tttttttttttttcagatatcatttttttctactttgggagaaaaagtgaggagatagagataaaaatacaaagaaaaactagcgtaatcccccaacccatacttcatttttaaacaaacaggccaggtcctgccaggccttcttccccattaaatcccaaggccagctccagtcccaaccccaacccctggcatggcgccgaaggaagcttcaggcttcgggcaagagctccagcccagggcaggcaggtcgtgggccctactgccagagcacaaccttcctgccctgggtccacgntcaccatgtgggctcccggagtaggcaccaggccacggcgtttgacgggcagcgcaattggggtccctntagttctgcttttncagttttcccggtgttccacattcccagatttttaaagggggccccatttacaagggngccttgccagttgcataagtttttttttnccggggtttgaacanagttttttggggtcccagtttnagganccacattttnaaggctnttgg

SEQ ID NO: 785 - DNA, 577 bp, Homo sapiens
  modified_base (404)..(404): a, c, t or g
  modified_base (409)..(409): a, c, t or g
  modified_base (422)..(422): a, c, t or g
  modified_base (465)..(465): a, c, t or g
  modified_base (533)..(533): a, c, t or g
  modified_base (541)..(541): a, c, t or g
gatctgggtcacctggtctcctgatcttggagaagtcaagttcttatcccagacttgagaggttacaagcctccaggtctctggcaaagtgtggagatgatggacagccatttgtacacacaccagccagtcccttagcatatctctcttggttttgtctcaggtctgcctcagccacctccctgacgctgtcccactgtgtgaatgtggtgaaggggcttctggattttaagaagaggagaggtcactcaattgggggagcccctgagcagcgataccagatcatccctgtgtgtgtggctgcccgacttcctacccgggctcaggatgtgctgcagcctcctggccactggaggggcttgaccgccttgatccacctctgggaatgttgtggggaagtcgcngggangccaaccagaccngggagggagctggttggcagcatcaccagtgttggattttganccctcgggctaacaggtttttagcagcaatttacaaccaggttgcccagttttggaaggttgggggangcacagtncaaggagacattttttggacacaaggttaaggttac

SEQ ID NO: 786 - DNA, 2160 bp, Homo sapiens
tgggcgggaggaacgcgccgctaggcgggagagcgcggccatggcggggccgggcgtccccggtgcccccgcagcgcgctggaaacgccacatcgtgcggcagctgcggcttcgggaccgtacgcaaaaggcgcttttcctggagctggtgccggcctataaccatctcttagagaaggctgagctgctggacaagttctcaaagaagctgcagccggagccaaacagtgtcactcccaccacccaccagggcccctgggaggagtcagagcttgactcagaccaagtcccatcactggtcgcactgagggtgaagtggcaggaggaggaggaggggctccggctggtctgtggtgagatggcctaccaggtggtggagaagggcgcggccctgggcacgctggagtcggagctgcagcagaggcaaagcaggctggcagccctggaggcccgcgtggcgcagctgcgagaggcgcgggcgcagcaggcccagcaggtggaggagtggcgggcgcagaatgcggtgcagcgggcagcctacgaggcgctgcgcgcgcacgtcgggctccgggaggcggcactgcgcaggctccaggaagaggcgcgcgacctgctggagaggctcgtgcagcgcaaggcgcgcgccgcggccgagcgcaacctgcgcaacgagcgccgggagcgggccaagcaggcgcgggtgtcccaggagctgaagaaggctgccaagcggaccgtgagcatcagcgagggcccggacaccctaggcgatgggatgagggagagaagggagactctggctctggcccctgagccagagcccctggagaaggaagcttgtgagaagtggaagaggcccttcaggtctgcctcagccacctccctgacgctgtcccactgtgtggatgtggtgaaggggcttctggattttaagaagaggagaggtcactcaattgggggagcccctgagcagcgataccagatcatccctgtgtgtgtggctgcccgacttcctacccgggctcaggatgtgctggatgcccacctctctgaggtcaatgctgttcgttttggccccaacagcagcctcctggccactggaggggctgaccgcctgatccacctctggaatgttgtgggaagtcgcctggaggccaaccagaccctggagggagctggtggcagcatcaccagtgtggactttgacccctcgggctaccaggttttagcagcaacttacaaccaggctgcccagctctggaaggtgggggaggcacagtccaaggagacactgtctggacacaaggataaggtgacagctgccaaattcaagctaacgaggcaccaggcagtgactgggagccgcgaccggacagtgaaggagtgggacctcggccgtgcctattgctccaggaccatcaatgtcctttcctactgtaatgacgtggtgtgtggggaccatatcatcattagtggccacaatgaccagaagatccggttctgggacagcagggggccccactgcacccaggtcatccctgtgcagggccgggtcacctccctgagcctcagccacgaccaactgcacctgctcagctgttcccgagacaacacactcaaggtcatcgacctgcgtgtcagcaacatccgccaggtgttcagggccgatggcttcaagtgtggttctgactggaccaaagctgtgttcagcccggacagaagctatgcactggcaggctcctgtgatggggccctttacatctgggatgtggacaccgggaaactggagagcagactacagggaccccattgcgctgccgtcaacgccgtggcctggtgctactccgggagccacatggtgagcgtggaccagggcaggaaggttgtgctctggcagtagggccacgacctgcctgcctgggctggagctcttgcccgaagcctgaagcttccttcggcgccatgcaggggttggggttgggactggagctggccttgggatttaatggggaagaaggcctggcaggacctggcctgtttgtttaaaaatgaagtatgggttgggggattacgctagtttttctttgtatttttatctctatctcctcactttttctcccaaagtagaaaaaaatgatatctgaaaaaaaaaaaaaaaaa

SEQ ID NO: 787 - DNA, 556 bp, Homo sapiens
  modified_base (10)..(10): a, c, t or g
  modified_base (27)..(27): a, c, t or g
  modified_base (40)..(40): a, c, t or g
  modified_base (47)..(47): a, c, t or g
  modified_base (58)..(58): a, c, t or g
  modified_base (64)..(64): a, c, t or g
  modified_base (67)..(67): a, c, t or g
  modified_base (73)..(73): a, c, t or g
  modified_base (140)..(140): a, c, t or g
  modified_base (189)..(189): a, c, t or g
  modified_base (257)..(257): a, c, t or g
  modified_base (398)..(398): a, c, t or g
  modified_base (407)..(407): a, c, t or g
  modified_base (412)..(412): a, c, t or g
  modified_base (422)..(422): a, c, t or g
  modified_base (452)..(452): a, c, t or g
  modified_base (463)..(463): a, c, t or g
  modified_base (536)..(536): a, c, t or g
  modified_base (541)..(541): a, c, t or g
  modified_base (547)..(547): a, c, t or g
tttttttttngttatttacatttttantgtaattttaaantcctggntcccaagaagncttggnttnaatttncttttcttcataacaaacaattctgtctcccacttgaaattccatattgtcttcatctaaactgagnaccacaatccattcccgttttgaacaattgaaatgtcatctttatggcngtttcaatggaggttaatgagtcccttccaaattacatgtccattacgggttagtttaaatttttttngtttttctaactgtcccttttgggactctgcagccagccacaggaacttttttcttcccttctgttacagagaaggtagctagtatagatgcctcacctactgggtgctcttccacagcacaggggaatctgctgctcagntcctcttgnaaatnttcaacaagncggtaaattattttgtgaagtttaatttgnctccttttttngcagctgactgttgggataacattgcctgcattcacattaaagccatatataacaccatcaattgtttcagcnagggnaacacnttggcactt

SEQ ID NO: 788 - DNA, 2965 bp, Homo sapiens
cggggctgtaggtaggagttaagtgggtaggatcccttaaccagggttgtccggtgcaggtggtgtgtgttgtttcgcctaacgtgtcagtggcacaaatcacgcgaacttcataaacattgtgcgttcggaagcctttccaagatgcatttaatccctgcgtgagcccacgttaggcattcacgaaggcatgtgcactgttctctcggaagcggctggccggcttcccctcctcgcgcgcggctgtgggtgcaggtcctcacttcccagcctcccatgggcccaaggccttctgggctccaatttgaggcgagccaccccagatccgtaatttttctgcagtgatttatttttacctttctgattccttgacaaggatatcctagcggcgaaacaacaccgtactgggagtcagaacgtctgggttctagtcttgactgccattaactagcggtatgacattggagaagcttttttgacccttctggatttccgtttccttttctgtaaaatgaggagcttggaagatccggaaaatgaggcccataggaaacaagtgacttgctgagtccagataacactgactgtcagaagtctcgctctgtctccccggctggagtgcagtggcgtgatcttggctcactgcaacctctgtctcccgggttcaagaaattctcctgcctcagcctcccaagtagctgggactacaggcatgtgccaccacgcccaggagaaacatgaaccagaagctactgaagttggagaacttgctacgatttcacactatttataggcaactgcacagtctgtgtcaaagaagagcattaagacagtggaggcatgggttttcatctgcttaccctgtgtggacagctcaactgtgtgcctggccctggccaacagatgtgctcactggggctgctttatctcagtataggcttctagtaacaaaaaaggaagaaggaccatggaaatctcagttatcttcaacaaaatctaaaaaggtggtagaagtatggattggaatgactattgaggaactggccagggcaatggaaaaaaacacagattatgtatatgaagctttattgaacactgatattgacatagattcactggaagcagactcacatttagatgaagtctggatcaaagaagtgataacgaaggcagggatgaagttaaagtggagtaaattaaaacaggacaaagtcagaaaaaataaagatgctgtaagaaggccccaggcagatccagctttattaaccccaaggtccccagttgttactataatgggccatgttgatcacgggaaaacgacattacttgacaaatttcgaaaaactcaagtggcagcagtggaaactggaggcatcactcagcacattggtgcctttcttgtctctctgccttctggggaaaagataacttttcttgatactccaggacatgctgctttctcagcaatgagagccagaggtgctcaggtcactgacattgtcgtattggttgtagctgcagatgatggagtgatgaaacaaactgtagaatctattcagcatgccaaagatgcacaggttcctattatccttgccgtaaataaatgtgacaaagctgaggctgatcctgagaaagtgaaaaaagagctgctggcttacgatgtggtatgtgaagattatggaggtgatgttcaagcagtgcctgtctccgcacttacgggcgataatctgatggctttggcagaagcaacagttgctcttgcagaaatgttagaattgaaagcagatcccaatggtccagtggaaggaacagtaatagagtctttcacagacaaaggaagaggtcttgttactacagctataattcaaagaggaactttaagaaaaggctctgttctggttgctggaaaatgttgggcaaaagtacgcttaatgtttgatgaaaatggaaaaacaattgatgaggcctatcccagcatgccagtgggaattacaggctggagagaccttccttctgcaggagaagaaattcttgaagtagaatctgagccaagggcacgtgaagttgttgactggaggaaatatgaacaagaacaggagaaaggtcaggaggatctgaaaataatagaagaaaagcgaaaggaacacaaagaagcacatcagaaagcccgtgagaagtatggccatctactgtggaagaagagatcaattctacggtttttagaaagaaaagaacaaatacccttaaagccaaaagagaaaagggaaagagattcaaatgtactttctgtgattattaaaggtgatgttgatggttctgttgaggccattttgaacattatagatacctatgatgcttcacacgagtgtgaactagaattagtacattttggagtgggtgatgtaagtgcaaatgatgttaaccttgctgaaacatttgatggtgttatatatggctttaatgtgaatgcaggcaatgttatccaacagtcagctgcaaaaaaaggagtaaaaattaaacttcacaaaataatttaccgtcttgttgaagatttgcaagaggaactgagcagcagattaccctgtgctgtggaagagcacccagtaggtgaggcatctatactagctaccttctctgtaacagaagggaagaaaaaagttcctgtggctggctgcagagtccaaaagggacagttagaaaaacaaaaaaaatttaaactaacccgtaatggacatgtaatttggaagggctcattaacctcattgaaacaccataaagatgacatttcaattgtcaaaacgggaatggattgtggtctcagtttagatgaagacaatatggaatttcaagtgggagacagaattgtttgttatgaagaaaagcaaattcaagccaagacttcttgggatccaggattttaaaattacattaaaaatgtaaataactcaaaaaaaaaaaaaaaaaa

SEQ ID NO: 789 - DNA, 528 bp, Homo sapiens
  modified_base (4)..(4): a, c, t or g
  modified_base (185)..(185): a, c, t or g
  modified_base (359)..(359): a, c, t or g
  modified_base (363)..(363): a, c, t or g
  modified_base (366)..(366): a, c, t or g
  modified_base (487)..(487): a, c, t or g
  modified_base (503)..(503): a, c, t or g
  modified_base (526)..(526): a, c, t or g
cttngctctcccagcggcaaggagggggatgtctactctccagcacgtggcttcctctcccactcccacttcttgtgcttcctctcccctctgcccagcccctgcctcggcctcccccgtgggcctcccgccccaccccaacccccgtcacactcacacaaggttgacatcgtctgcctgtggtnccacgaacacaccaagtttcaaatcctttgttgctgccactgcctctgtgacacccccacaacaggggccagaggtggttggcacccccagtcccttgaaatcccccagaagcagctttcagagcctctccttccccctcttctacatggagggggaagaaaaaggattcaaangganttncctgaggaaatgttggatgtggccatgtttttgaatgtttttttttaaaatattttattactagcccacccatcaatttggaaagatgaaatttgctcttactcccataactgattttaangtccgaggcaaagccnagttaaaaaaggaggtaagtgtnac

SEQ ID NO: 790 - DNA, 472 bp, Homo sapiens
  modified_base (27)..(27): a, c, t or g
  modified_base (30)..(30): a, c, t or g
  modified_base (32)..(32): a, c, t or g
  modified_base (62)..(62): a, c, t or g
  modified_base (77)..(77): a, c, t or g
  modified_base (393)..(393): a, c, t or g
  modified_base (403)..(403): a, c, t or g
  modified_base (416)..(416): a, c, t or g
  modified_base (424)..(424): a, c, t or g
  modified_base (436)..(436): a, c, t or g
  modified_base (451)..(451): a, c, t or g
  modified_base (453)..(453): a, c, t or g
aaccggaagacaccagtccgggaaggnggnanagggtgcaaatagttctacaaaccagttgnacctgagcaaggtgnacctccaagtgtgggctcattagggcaacatccattcataaaccaggaggtgggccaggtggaagtaaaatctgagaagcttgacttcaaggacagagtccagttcgaagattgggtccctggacaatatcacccacgtccctggcggaggaaataaaaagattgaaacccacaagctgaccttccgcgagaacgccaaagccaagacagaccacggggcggagatcgtgtacaagtcgccagtggtgtctggggacacgtctccacggcatctcagcaatgtctcctccaccggcagcatcgacatggtagactngccccagctngccacgctagctnacgaggtntctgccttcctnggcaagcagggtttntnatcaaggcccttggggggt

SEQ ID NO: 791 - DNA, 3747 bp, Homo sapiens
cctcccctggggaggctcgcgttcccgctgctcgcgcctgccgcccgccggcctcaggaacgcgccctctcgccgcgcgcgccctcgcagtcaccgccacccaccagctccggcaccaacagcagcgccgctgccaccgcccaccttctgccgccgccaccacagccaccttctcctcctccgctgtcctctcccgtcctcgcctctgtcgactatcaggtgaactttgaaccaggatggctgagccccgccaggagttcgaagtgatggaagatcacgctgggacgtacgggttgggggacaggaaagatcaggggggctacaccatgcaccaagaccaagagggtgacacggacgctggcctgaaagaatctcccctgcagacccccactgaggacggatctgaggaaccgggctctgaaacctctgatgctaagagcactccaacagcggaagatgtgacagcacccttagtggatgagggagctcccggcaagcaggctgccgcgcagccccacacggagatcccagaaggaaccacagctgaagaagcaggcattggagacacccccagcctggaagacgaagctgctggtcacgtgacccaagagcctgaaagtggtaaggtggtccaggaaggcttcctccgagagccaggccccccaggtctgagccaccagctcatgtccggcatgcctggggctcccctcctgcctgagggccccagagaggccacacgccaaccttcggggacaggacctgaggacacagagggcggccgccacgcccctgagctgctcaagcaccagcttctaggagacctgcaccaggaggggccgccgctgaagggggcagggggcaaagagaggccggggagcaaggaggaggtggatgaagaccgcgacgtcgatgagtcctccccccaagactcccctccctccaaggcctccccagcccaagatgggcggcctccccagacagccgccagagaagccaccagcatcccaggcttcccagcggagggtgccatccccctccctgtggatttcctctccaaagtttccacagagatcccagcctcagagcccgacgggcccagtgtagggcgggccaaagggcaggatgcccccctggagttcacgtttcacgtggaaatcacacccaacgtgcagaaggagcaggcgcactcggaggagcatttgggaagggctgcatttccaggggcccctggagaggggccagaggcccggggcccctctttgggagaggacacaaaagaggctgaccttccagagccctctgaaaagcagcctgctgctgctccgcgggggaagcccgtcagccgggtccctcaactcaaagctcgcatggtcagtaaaagcaaagacgggactggaagcgatgacaaaaaagccaagacatccacacgttcctctgctaaaaccttgaaaaataggccttgccttagccccaaactccccactcctggtagctcagaccctctgatccaaccctccagccctgctgtgtgcccagagccaccttcctctcctaaacacgtctcttctgtcacttcccgaactggcagttctggagcaaaggagatgaaactcaagggggctgatggtaaaacgaagatcgccacaccgcggggagcagcccctccaggccagaagggccaggccaacgccaccaggattccagcaaaaaccccgcccgctccaaagacaccacccagctctggtgaacctccaaaatcaggggatcgcagcggctacagcagccccggctccccaggcactcccggcagccgctcccgcaccccgtcccttccaaccccacccacccgggagcccaagaaggtggcagtggtccgtactccacccaagtcgccgtcttccgccaagagccgcctgcagacagcccccgtgcccatgccagacctgaagaatgtcaagtccaagatcggctccactgagaacctgaagcaccagccgggaggcgggaaggtgcagataattaataagaagctggatcttagcaacgtccagtccaagtgtggctcaaaggataatatcaaacacgtcccgggaggcggcagtgtgcaaatagtctacaaaccagttgacctgagcaaggtgacctccaagtgtggctcattaggcaacatccatcataaaccaggaggtggccaggtggaagtaaaatctgagaagcttgacttcaaggacagagtccagtcgaagattgggtccctggacaatatcacccacgtccctggcggaggaaataaaaagattgaaacccacaagctgaccttccgcgagaacgccaaagccaagacagaccacggggcggagatcgtgtacaagtcgccagtggtgtctggggacacgtctccacggcatctcagcaatgtctcctccaccggcagcatcgacatggtagactcgccccagctcgccacgctagctgacgaggtgtctgcctccctggccaagcagggtttgtgatcaggcccctggggcggtcaataattgtggagaggagagaatgagagagtgtggaaaaaaaaagaataatgacccggcccccgccctctgcccccagctgctcctcgcagttcggttaattggttaatcacttaacctgcttttgtcactcggctttggctcgggacttcaaaatcagtgatgggagtaagagcaaatttcatctttccaaattgatgggtgggctagtaataaaatatttaaaaaaaaacattcaaaaacatggccacatccaacatttcctcaggcaattccttttgattcttttttcttccccctccatgtagaagagggagaaggagaggctctgaaagctgcttctgggggatttcaagggactgggggtgccaaccacctctggccctgttgtgggggttgtcacagaggcagtggcagcaacaaaggatttgaaaactttggtgtgttcgtggagccacaggcagacgatgtcaaccttgtgtgagtgtgacgggggttggggtggggcgggaggccacgggggaggccgaggcaggggctgggcagaggggaggaggaagcacaagaagtgggagtgggagaggaagccacgtgctggagagtagacatccccctccttgccgctgggagagccaaggcctatgccacctgcagcgtctgagcggccgcctgtccttggtggccgggggtgggggcctgctgtgggtcagtgtgccaccctctgcagggcagcctgtgggagaagggacagcgggttaaaaagagaaggcaagcctggcaggagggttggcacttcgatgatgacctccttagaaagactgaccttgatgtcttgagagcgctggcctcttcctccctccctgcagggtagggcgcctgagcctaggcggttccctctgctccacagaaaccctgttttattgagttctgaaggttggaactgctgccatgattttggccactttgcagacctgggactttagggctaaccagttctctttgtaaggacttgtgcctcttgggagacgtccacccgtttccaagcctgggccactggcatctctggagtgtgtgggggtctgggaggcaggtcccgagccccctgtccttcccacggccactgcagtcaccccgtctgcgccgctgtgctgttgtctgccgtgagagcccaatcactgcctatacccctcatcacacgtcacaatgtcccgaattc

SEQ ID NO: 792 - DNA, 323 bp, Homo sapiens
  modified_base (228)..(228): a, c, t or g
  modified_base (248)..(248): a, c, t or g
  modified_base (252)..(252): a, c, t or g
  modified_base (260)..(260): a, c, t or g
  modified_base (280)..(280): a, c, t or g
  modified_base (306)..(306): a, c, t or g
tttttttttttttttctggctgacaaagatatttattgagggtttactgggtacagcgagaagggctgaatggcttgggatgcagagagagacccctcccctgggatcctgcagctccaggcccctgtggttggggtgggggctggaacctatgaacattctgcaggggccactgacttctccacggtactcccttcttgcataacctgggcagctgtagcttctgcnggacctccactgttcgggcntcangctcaggnagctgcttgccacgtacttnttgttgctctgtttggagggcgtagncttctccacgctctggg

SEQ ID NO: 793 - DNA, 432 bp, Homo sapiens
  modified_base (74)..(74): a, c, t or g
  modified_base (187)..(187): a, c, t or g
  modified_base (355)..(355): a, c, t or g
  modified_base (388)..(388): a, c, t or g
  modified_base (428)..(428): a, c, t or g
ttttttttttttttttttcagtttgtcagtagaaggtgatttattggaaagtttagaaacatgtggcaacaagnacaggtagatctctgcactgttactccccagaccgagagcttacataccatatagaaagagcataagtgcttcagaaggaatgtgtaggatcgctgaaattgacccctcaggnaaaggcaagaatgctgtgtctcatagcccataatttgccaaaggacaggacttaggtaagtacatgtttatgataacatcaaggttgtcttgggcttacacaaggcaacagtaaggtaaagtaggaaatcttgagggcattcctggggcctgggggttaaatcaggangtcaacatgggcagattaggcatcccaagatgnaggtgggccatcatccctgccacagttttcccaacgtttnttac

SEQ ID NO: 794 - DNA, 474 bp, Homo sapiens
  modified_base (436)..(436): a, c, t or g
  modified_base (442)..(442): a, c, t or g
  modified_base (460)..(460): a, c, t or g
cggaaggtccgggagtgtccgccataaagtcgtttgaggtgaccgttgcgtaattgtgagtctgtgagagaagatgtgaagtatggcctcgtcccggtcatctgggcgtgcgggtcccgggttttgatcgcgcgtttgtgtagttttaacttctagtcatggcgaatgatcgcaggagagcacagactggaccctgctacgatctctcttggagtggatcagactgatgatcaccaacaaccaactcattcccggataaggaagaagagagtgtcacctacttcagtgtggtttcaaccctacttctgcatcttaaagacactgtatggtttcagcagtagtgcccctgttcattagtccccctgaatgtttttcattccctcatctcatcctttttcttagcagcattcaatggaatcccttcattctaggaaancattcntataacctttgggttttncatgaggaccattc

SEQ ID NO: 795 - DNA, 469 bp, Homo sapiens
  modified_base (54)..(54): a, c, t or g
  modified_base (235)..(235): a, c, t or g
  modified_base (319)..(319): a, c, t or g
  modified_base (325)..(325): a, c, t or g
  modified_base (332)..(332): a, c, t or g
  modified_base (371)..(371): a, c, t or g
  modified_base (384)..(384): a, c, t or g
  modified_base (400)..(400): a, c, t or g
  modified_base (405)..(405): a, c, t or g
  modified_base (462)..(462): a, c, t or g
ttttttttttgccagaaaagaaaagaaaaaacaagcatacactgtgtgacaggnaagggggtagacagagttattcataggctctgaacttcctcatttgctcagcaccttccaggtttaaaagactaagtatattcacaacatttctcgtccactcattacagacaagtgtacatccaagcccaataaaacaaataggcaatccatataaaaaaacaggtaaatgttgaaaaanttattggaaatttctaccatttgccaatgataaggcaaggaacaaaggcccttgctggaacagctgggcatgtcttcctgctgncttgcnattttgnaggtattaaggcatcttaatagggcttttcctccggggntaggggaccttgncttcacccctcccccngcttncatctctttttttcctgcctccagttttggataacggcaggaacattaaacagttcngggtttt

SEQ ID NO: 796 - DNA, 1413 bp, Homo sapiens
  modified_base (6)..(6): a, c, t or g
  modified_base (11)..(11): a, c, t or g
  modified_base (901)..(901): a, c, t or g
  modified_base (920)..(920): a, c, t or g
  modified_base (952)..(952): a, c, t or g
  modified_base (954)..(954): a, c, t or g
  modified_base (993)..(993): a, c, t or g
  modified_base (1003)..(1003): a, c, t or g
  modified_base (1047)..(1047): a, c, t or g
  modified_base (1049)..(1051): a, c, t or g
  modified_base (1055)..(1055): a, c, t or g
  modified_base (1058)..(1058): a, c, t or g
  modified_base (1073)..(1073): a, c, t or g
  modified_base (1077)..(1078): a, c, t or g
  modified_base (1086)..(1086): a, c, t or g
  modified_base (1103)..(1103): a, c, t or g
  modified_base (1112)..(1114): a, c, t or g
  modified_base (1116)..(1116): a, c, t or g
  modified_base (1121)..(1121): a, c, t or g
  modified_base (1124)..(1125): a, c, t or g
  modified_base (1128)..(1128): a, c, t or g
  modified_base (1132)..(1134): a, c, t or g
  modified_base (1138)..(1138): a, c, t or g
  modified_base (1155)..(1155): a, c, t or g
  modified_base (1158)..(1158): a, c, t or g
  modified_base (1169)..(1170): a, c, t or g
  modified_base (1173)..(1174): a, c, t or g
  modified_base (1178)..(1178): a, c, t or g
  modified_base (1188)..(1194): a, c, t or g
  modified_base (1200)..(1200): a, c, t or g
  modified_base (1203)..(1204): a, c, t or g
  modified_base (1206)..(1206): a, c, t or g
  modified_base (1211)..(1212): a, c, t or g
  modified_base (1220)..(1221): a, c, t or g
  modified_base (1223)..(1223): a, c, t or g
  modified_base (1225)..(1225): a, c, t or g
  modified_base (1231)..(1232): a, c, t or g
  modified_base (1236)..(1236): a, c, t or g
  modified_base (1238)..(1241): a, c, t or g
  modified_base (1244)..(1246): a, c, t or g
  modified_base (1249)..(1251): a, c, t or g
  modified_base (1253)..(1258): a, c, t or g
  modified_base (1260)..(1260): a, c, t or g
  modified_base (1265)..(1266): a, c, t or g
  modified_base (1269)..(1269): a, c, t or g
  modified_base (1272)..(1273): a, c, t or g
  modified_base (1281)..(1281): a, c, t or g
  modified_base (1285)..(1285): a, c, t or g
  modified_base (1289)..(1295): a, c, t or g
  modified_base (1297)..(1297): a, c, t or g
  modified_base (1299)..(1299): a, c, t or g
  modified_base (1303)..(1304): a, c, t or g
  modified_base (1310)..(1311): a, c, t or g
  modified_base (1316)..(1318): a, c, t or g
  modified_base (1320)..(1325): a, c, t or g
  modified_base (1328)..(1328): a, c, t or g
  modified_base (1330)..(1331): a, c, t or g
  modified_base (1333)..(1333): a, c, t or g
  modified_base (1336)..(1336): a, c, t or g
  modified_base (1341)..(1351): a, c, t or g
  modified_base (1353)..(1356): a, c, t or g
  modified_base (1358)..(1359): a, c, t or g
  modified_base (1361)..(1362): a, c, t or g
  modified_base (1364)..(1364): a, c, t or g
  modified_base (1369)..(1370): a, c, t or g
  modified_base (1374)..(1404): a, c, t or g
  modified_base (1406)..(1407): a, c, t or g
  modified_base (1412)..(1412): a, c, t or g
cagatngccancaggccgaggggcttgttgtggtcctcagtcacctggacttctgccctatgtctgatggcttctatttataaacctaaccctgtaaccaaggcagttagtctctcttccacatcccctgtgacattttcattttggcatctgcctttggctaatgctgactcctttactcattcttcttcctgtaaggtgcttgtttgccagtgcttgttcattaagtctccactatttttagtaagcttccaagctcactatgtctgttccctccaaaccactaccgtgcttattagattccatccatccattcatttgtatgtttattcttcaagaatattttcagtgttttccaataatatgcttggctctgggtttgcagacatgaatcaattcaatccctgttctagtggaaaaataaaacaagcagagagataaagaacagtgatagagggaagcacaggggctctgggagccggggcagggtccctctatcagcccagggggccagtgtcaaccttgtggaggcagtgacagatgattacctgagctgtcttaacactgggtaaagagggaggggaggagatgtggaggacaaaccaagagagaacagcaggttcaaatatacgaggacaagaaatgcacacagaagactctgagctgtttaatgttcttgcgttatcaaactggaggcaggaaaaaagagatgaagctgggggaggggtgagcaaggtcctatcctggaggaaaagcctattaagatgcttatactcaatgctgcaagcagcaggaagacatgccagctgttcagcaagggctttgttcttgcttatcattgggcaaatggtaaaaattcaataattttttccaacattaacctgtttttttaatatggatngctatttgttttattgggnctggatgtacacttgtctgtaatgagtggacnanaaatgtggtgaatatacttagtctttaaacctggaaggngctgaccaantaaggaagttcaaagcctatgaataaatttgctacccccctccngnnnaaanggnttggcttgttttccntttnntttcgggnaaaaaaaaaaaaaaaantcccggggnnngngggantannggncggnnntttnaaggggggggggggaanccngggggtcccanntanncccngaaagggggnnnnnnnaaaaanccnnanaaacnngggagggnntncngcaccnnaccnannnnttnnnggnnngnnnnnngnccccnnttnggnngggggggngggngggnnnnnnncncncccnngggggnnggggnnncnnnnnnccncnngnggnggggnnnnnnnnnnncnnnngnngnncnccccnncccnnnnnnnnnnnnnnnnnnnnnnnnnnnnnnnannggaang

SEQ ID NO: 797 - DNA, 4421 bp, Homo sapiens
tgctgcgaggatgctgcctgggcggctgtgctgggtgccgctcctgctggcgctgggcgtggggagcggcagcggcggtggcggggacagccggcagcgccgcctcctcgcggctaaagtcaataagcacaagccatggatcgagacttcatatcatggagtcataactgagaacaatgacacagtcattttggacccaccactggtagccctggataaagatgcaccggttccttttgcaggggaaatctgtgcgttcaagatccatggccaggagctgccctttgaggctgtggtgctcaacaagacatcaggagagggccggctccgtgccaagagccccattgactgtgagttgcagaaggagtacacattcatcatccaggcctatgactgtggtgctgggccccacgagacagcctggaaaaagtcacacaaggccgtggtccatatacaggtgaaggatgtcaacgagtttgctcccaccttcaaagagccagcctacaaggctgttgtgacggagggcaagatctatgacagcattctgcaggtggaggccattgacgaggactgctccccacagtacagccagatctgcaactatgaaatcgtcaccacagatgtgccttttgccatcgacagaaatggcaacatcaggaacactgagaagctgagctatgacaaacaacaccagtatgagatcctggtgaccgcctacgactgtggacagaagcccgctgctcaggacaccctggtgcaggtggatgtgaagccagtttgcaagcctggctggcaagactggaccaagaggattgagtaccagcctggctccgggagcatgcccctgttccccagcatccacctggagacgtgcgatggagccgtgtcttccctccagatcgtcacagagctgcagactaattacattgggaagggttgtgaccgggagacctactctgagaaatcccttcagaagttatgtggagcctcctctggcatcattgacctcttgccatcccctagcgctgccaccaactggactgcaggactgctggtggacagcagtgagatgatcttcaagtttgacggcaggcagggtgccaaaatccccgatgggattgtgcccaagaacctgaccgatcagttcaccatcaccatgtggatgaaacacggccccagccctggtgtgagagccgagaaggaaaccatcctctgcaactcagacaaaaccgaaatgaaccggcatcactatgccctgtatgtgcacaactgccgcctcgtctttctcttgcggaaggacttcgaccaggctgacacctttcgccccgcggagttccactggaagctggatcagatttgtgacaaagagtggcactactatgtcatcaatgtggagtttcctgtggtaaccttatacatggatggagcaacatatgaaccatacctggtgaccaacgactggcccattcatccatctcacatagccatgcaactcacagtcggcgcttgttggcaaggaggagaagtcaccaaaccacagtttgctcagttctttcatggaagcctggccagtctcaccatccgccctggcaaaatggaaagccagaaggtgatctcctgcctgcaggcctgcaaggaagggctggacattaattccttggaaagccttggccaaggaataaagtatcacttcaacccctcgcagtccatcctggtgatggaaggtgacgacattgggaacattaaccgtgctctccagaaagtctcctacatcaactccaggcagttcccaacggcgggtgtgcggcgcctcaaagtatcctccaaagtccagtgctttggggaagacgtatgcatcagtatccctgaggtagatgcctatgtgatggtcctccaggccatcgagccccggatcaccctccggggcacagaccacttctggagacctgctgcccagtttgaaagtgccaggggagtgaccctcttccctgatatcaagattgtgagcaccttcgccaaaaccgaagcccccggggacgtgaaaaccacagaccccaaatcagaagtcttagaggaaatgcttcataacttagatttctgtgacattttggtgatcggaggggacttggacccaaggcaggagtgcttggagctcaaccacagtgagctccaccaacgacacctggatgccactaattctactgcaggctactccatctacggtgtgggctccatgagccgctatgagcaggtgctacatcacatccgctaccgcaactggcgtccggcttcccttgaggcccggcgtttccggattaagtgctcagaactcaatgggcgctacactagcaatgagttcaacttggaggtcagcatccttcatgaagaccaagtctcagataaggagcatgtcaatcatctgattgtgcagcctcccttcctccagtctgtccatcatcctgagtcccggagtagcatccagcacagttcagtggtcccaagcattgccacagtggtcatcatcatctccgtgtgcatgcttgtgtttgtcgtggccatgggtgtgtaccgggtccggatcgcccaccagcacttcatccaggagactgaggctgccaaggaatctgagatggactgggacgattctgcgctgactatcacagtcaaccccatggagaaacatgaaggaccagggcatggggaagatgagactgagggagaagaggaggaagaagccgaggaagaaatgagctccagcagtggctctgacgacagcgaagaggaggaggaggaggaagggatgggcagaggcagacatgggcagaatggagccaggcaagcccagctggagtgggatgactccaccctcccctactagtgcccaggggtctgctgcctggcccacatgtcccttttgtaaaccctgacccagtgtatgcccatgtctatcatacctcacctctgatgtctgtgacatgtctgggaaggccttctccagcttcctggagcccaccctttaagccttgggcactccctgtgtttcatccatggggaagttccaagaagcccagcatggccatcagtgaggacttcagggtagactttgtcctgtagcctccacttctgccctaagttccccagcatcctgactacctgtctgcagagtttgcctttgttttttcctgcagggaagaaggcccacctttgtgtcactcacctccccaggctcagagtccccaaggccctggggttccaactcactgtgcgtctcctccacacagaccagtaggttctcctatgctgactccaggttgcttcatacaaggagggtggttgaacttcacacacgtaaggtcttagtgcttaacagtttaaaggaaagtccttgttgaggcagaactaagtttacagggaaaggtacacacattctctctctctctctctctctgtctatctagttccccagcttggagagcctttccccttgcttctttctgaggccatataagcttataagaaaagtcccaaaccaagaataggtccttggccacaagcagggtctgatcccccatcagagctatctgagcctgcctgtctgggcacctgctgcaaccatgcagctaccctgccaggggcactcagcaaacagaaccacagggcccaggaggcattccacacaggcactgccccaggacaacacaacaaggacagtcacaacaaggacaacaaggacacaacacaacacacaacaaggacagtcacaacaagcctagagccagaaagcagatggaaatgctaatgaggtcaaacgtaggcttcatggtgggtggagtgggggtggctgggctcccccaggacagaggggaccctgaggttggcaaggctctcaccactcagccttatggtcccttatctcctatcttccctcttgagaaaatacacgctttctgcatgtattagaaacgcacgagctccaccaagtctacaatgaaagtttgaaatttaactgcaaggaattagaagcatatttgcaatcattgcagcttcttctttcttctgctcataaaaggaggaacactttagatagagggcaaatatatctgaaaacctaatttctttctttttttgataaggaaatcttttccatctccatcctaacatgcacaacctgtgaagagaattgtttctatagtaactggtctgtgatcttttgtggccaagagaatagcaggcaagaattagggccttgacagaatttccacgaagctctgagaacatgtttgtttcgaatgtctgattcctctttgtcatcaatgtgtatgctctgtccccatccttcactcctcctcaagctcacaccaattggtttggcacaggcacagagctggtccctagttaagtggcatttatgttaaaaaaaa

SEQ ID NO: 798 - DNA, 431 bp, Homo sapiens
ttttccacacacttaaacagctgatttattttttctctttattgttacatacaatgtataaacacataaaacagaaaacagtagggatcctctaggatctctagggagacagtaaagtagaaagaggtctcagaaacatttttaaagtacaagacattcagtcgctcggcccaaaggcgtagaaggtttagagccagcagatagctgtactaaaggctccgtctctctccccagagccaggacaaccccagggagctctccattagcagccagtccacgcaggcaggatgctgcggagaaagctctatgctgagaacattccccttgatggaaagaagggcaacacaaaagggtaactaagagctccttcctctcgtgagggcgacaacttgaggaacagaaaaggagtgtcccatgtcactctgaccccc

SEQ ID NO: 799 - DNA, 395 bp, Homo sapiens
aagagctcaaggagatcatacagcaaggaccagactggcttgagctctctgagatgaccgagcagccagactatgacctggagacctttgtgaacaaagcggaatctgctctggcccagcaagccaagcatttctcagccctgcgaagatgtcatcaaggccttgcgcctggccatgcagctggaagagcaggctagcaggcaaataagcagcaagaaacggccccagtgacgactgcaaataaaaatctgtttggtttgacacccagcctcttccctggccctccccagagaactttgggtacctggtgggtctaggcagggtctgagctgggacaggttctggtaaatgccaagtatgggggcatctgggcccagggcagctgggggaggggg

SEQ ID NO: 800 - DNA, 2825 bp, Homo sapiens
gcgaaattgaggtttcttggtattgcgcgtttctcttccttgctgactctccgaatggccatggactcgtcgcttcaggcccgcctgtttcccggtctcgctatcaagatccaacgcagtaatggtttaattcacagtgccaatgtaaggactgtgaacttggagaaatcctgtgtttcagtggaatgggcagaaggaggtgccacaaagggcaaagagattgattttgatgatgtggctgcaataaacccagaactcttacagcttcttcccttacatccgaaggacaatctgcccttgcaggaaaatgtaacaatccagaaacaaaaacggagatccgtcaactccaaaattcctgctccaaaagaaagtcttcgaagccgctccactcgcatgtccactgtctcagagcttcgcatcacggctcaggagaatgacatggaggtggagctgcctgcagctgcaaactcccgcaagcagttttcagttcctcctgcccccactaggccttcctgccctgcagtggctgaaataccattgaggatggtcagcgaggagatggaagagcaagtccattccatccgtggcagctcttctgcaaaccctgtgaactcagttcggaggaaatcatgtcttgtgaaggaagtggaaaaaatgaagaacaagcgagaagagaagaaggcccagaactctgaaatgagaatgaagagagctcaggagtatgacagtagttttccaaactgggaatttgcccgaatgattaaagaatttcgggctactttggaatgtcatccacttactatgactgatcctatcgaagagcacagaatatgtgtctgtgttaggaaacgcccactgaataagcaagaattggccaagaaagaaattgatgtgatttccattcctagcaagtgtctcctcttggtacatgaacccaagttgaaagtggacttaacaaagtatctggagaaccaagcattctgctttgactttgcatttgatgaaacagcttcgaatgaagttgtctacaggttcacagcaaggccactggtacagacaatctttgaaggtggaaaagcaacttgttttgcatatggccagacaggaagtggcaagacacatactatgggcggagacctctctgggaaagcccagaatgcatccaaagggatctatgccatggcctcccgggacgtcttcctcctgaagaatcaaccctgctaccggaagttgggcctggaagtctatgtgacattcttcgagatctacaatgggaagctgtttgacctgctcaacaagaaggccaagctgcgcgtgctggaggacggcaagcaacaggtgcaagtggtggggctgcaggagcatctggttaactctgctgatgatgtcatcaagatgctcgacatgggcagcgcctgcagaacctctgggcagacatttgccaactccaattcctcccgctcccacgcgtgcttccaaattattcttcgagctaaagggagaatgcatggcaagttctctttggtagatctggcagggaatgagcgaggcgcagacacttccagtgctgaccggcagacccgcatggagggcgcagaaatcaacaagagtctcttagccctgaaggagtgcatcagggccctgggacagaacaaggctcacaccccgttccgtgagagcaagctgacacaggtgctgagggactccttcattggggagaactctaggacttgcatgattgccacgatctcaccaggcataagctcctgtgaatatactttaaacaccctgagatatgcagacagggtcaaggagctgagcccccacagtgggcccagtggagagcagttgattcaaatggaaacagaagagatggaagcctgctctaacggggcgctgattccaggcaatttatccaaggaagaggaggaactgtcttcccagatgtccagctttaacgaagccatgactcagatcagggagctggaggagaaggctatggaagagctcaaggagatcatacagcaaggaccagactggcttgagctctctgagatgaccgagcagccagactatgacctggagacctttgtgaacaaagcggaatctgctctggcccagcaagccaagcatttctcagccctgcgagatgtcatcaaggccttacgcctggccatgcagctggaagagcaggctagcagacaaataagcagcaagaaacggccccagtgacgactgcaaataaaaatctgtttggtttgacacccagcctcttccctggccctccccagagaactttgggtacctggtgggtctaggcagggtctgagctgggacaggttctggtaaatgccaagtatgggggcatctgggcccagggcagctggggagggggtcagagtgacatgggacactccttttctgttcctcagttgtcgccctcacgagaggaaggagctcttagttacccttttgtgttgcccttctttccatcaaggggaatgttctcagcatagagctttctccgcagcatcctgcctgcgtggactggctgctaatggagagctccctggggttgtcctggctctggggagagagacggagcctttagtacagctatctgctggctctaaaccttctacgcctttgggccgagcactgaatgtcttgtactttaaaaaaatgtttctgagacctctttctactttactgtctccctagagtcctagaggatccctactgttttctgttttatgtgtttatacattgtatgtaacaataaagagaaaaaataaaaaaaaaaaaaaaaaaaaaaaaaaaaaaaa

SEQ ID NO: 801 - DNA, 399 bp, Homo sapiens
  modified_base (330)..(330): a, c, t or g
ttttttttaataagttaaagttaatacaaatataaaaaggggaaagtcctctagattcaatgacatccacaaattgtacattatttacaccaaaagcacagggctcgtgtgggtgaacagtctgcagtcaaagccgatgctgggtgtccctgtagtgtagcagcccccgcgccgggttcaagggctcaactgagggttttgtcattttcaagtctgaaagtggctgttctcctgcctttgttgtttcttcttttcctggcgtctgggtttttctcccaatggggtggggtgggtttgtgtccccgattcactgctagtcccagaaaggtntccaagccgagactcctttccgggaaggaggctccttccgtgctgggtactgggtggttgtgatcggga

SEQ ID NO: 802 - DNA, 527 bp, Homo sapiens
  modified_base (49)..(49): a, c, t or g
  modified_base (159)..(159): a, c, t or g
  modified_base (218)..(218): a, c, t or g
  modified_base (223)..(223): a, c, t or g
  modified_base (296)..(296): a, c, t or g
  modified_base (481)..(481): a, c, t or g
  modified_base (507)..(507): a, c, t or g
ctcatcgccgaggtgaagaagcagctggagttggagaagcagcaggcgntggatgagaccaagaagaagcagtggtgcgccaactgcaagaaggaggccatcttttactgctgttggaacaccagctactgtgactacccctgccagcaagcccactgncctgagcacatgaagtcctgcacccagtcagctactgctcctcagcaggaaagcggatnttganggtgaacacagaaacactaaataagtcctcccaggggagctcctcgagcacacaatcagcaccttcagaaacnggccagcgcctccaaagagaaggagacgtcagctgagaaaagcaaggagagtggctcgacccttgacctttctggctccagagagacgccctcctccattctcttaggctccaaccaaggctctgtttagcaaaaggtgtgacaagcaacttgcctatgccccaaccaaccacagaccaccagcngaaccccaattacccggccagaagtnccattcccggggttaataat

SEQ ID NO: 803 - DNA, 4652 bp, Homo sapiens
gtgagaactaggagcctgtcctccatgttttataagtattgacattacacagtgttaacaatgcatccacagagcttggctgaagaggaaataaaaacagaacaggaggtggtagagggcatggatatctctactcgctccaaagatcctggctctgcagagagaacagcccagaaaagaaagttccccagccctccacattcttccaatggccactcgccgcaggacacatcaacaagccccattaaaaagaaaaagaaacctggcttactgaacagtaacaataaggagcagtcagaactaagacatggtccgttttactatatgaagcagccactcaccacagaccctgttgatgttgtaccgcaggatggacggaatgatttctactgctgggtttgtcaccgggaaggccaagtcctttgctgtgagctctgtccccgggtttatcacgctaagtgtctgagactgacatcggaaccagagggggactggttttgtcctgaatgtgagaaaattacagtagcagaatgcatcgagacccagagtaaagccatgacaatgctcaccattgaacagttatcctacctgctcaagtttgccattcagaaaatgaaacagccagggacagatgcattccagaagcccgttccattggaacagcaccctgactatgcggaatacatcttccatccaatggacctttgtacattggaaaagaatgcgaaaaagaaaatgtatggctgcacagaagccttcctggctgatgcaaagtggattttgcacaactgcatcatttataatgggggaaatcacaaattgacgcaaatagcgaaagtagtcatcaaaatctgtgaacatgagatgaatgaaatcgaagtatgtccagaatgttatctagctgcttgccaaaaacgagataactggttttgtgagccttgtagcaatccacatcctttggtctgggccaaactgaaggggtttccattctggcctgcaaaagctctaagggataaagacgggcaggtcgatgcccgattctttggacaacatgacagggcctgggttccaataaataattgctacctcatgtctaaagaaattcctttttctgtgaaaaagactaagagcatcttcaacagtgccatgcaagagatggaggtttacgtggagaacatccgcaggaagtttggggtttttaattactctccatttaggacaccctacacacccaacagccagtatcaaatgctgctcgatcccaccaaccccagcgccggcactgccaagatagacaagcaggagaaggtcaagctcaactttgacatgacggcatcccccaagatcctgatgagcaagcctgtgctgagtgggggcacaggccgccggatttccttgtcggatatgccgcgctcccccatgagcacaaactcttctgtgcacacgggctccgacgtggagcaggatgctgagaagaaggccacgtcgagccacttcagtgcgagcgaggagtccatggacttcctggataagagcacagcttcaccagcctccaccaagacgggacaagcagggagtttatccggcagcccaaagcccttctctcctcaactgtcagctcctatcacgacgaaaacggacaaaacctccaccaccggcagcatcctgaatcttaacctggatcgaagcaaagctgagatggatttgaaggagctgagcgagtcggtccagcaacagtccacccctgttcctctcatctctcccaagcgccagattcgtagcaggttccagctgaatcttgacaagaccatagagagttgcaaagcacaattaggcataaatgaaatctcggaagatgtctatacggccgtagagcacagcgattcggaggattctgagaagtcagatagtagcgatagtgagtatatcagtgatgatgagcagaagtctaagaacgagccagaagacacagaggacaaagaaggttgtcagatggacaaagagccatctgctgttaaaaaaaagcccaagcctacaaacccagtggagattaaagaggagctgaaaagcacgtcaccagccagcgagaaggcagaccctggagcagtcaaggacaaggccagccctgagcctgagaaggacttttccgaaaaggcaaaaccttcacctcaccccataaaggataaactgaagggaaaagatgagacggattccccaacagtccatttgggcctggactctgattcagagagcgaacttgtcatagatttaggagaagaccattctgggcgggagggtcgaaaaaataagaaggaacccaaagaaccatctcccaaacaggatgttgtaggtaaaactccaccatccacgacggtgggcagccattctcccccggaaacaccggtgctcacccgctcttccgcccaaacttccgcggctggcgccacagccaccaccagcacgtcctccacggtcaccgtcacggccccggcccccgccgccacaggaagcccagtgaaaaagcagaggccgcttttaccgaaggagactgccccggccgtgcagcgggtcgtgtggaactcatcaactgtccagcagaaggagatcacacagagcccatccacgtccaccatcaccctggtgaccagcacacagtcatcgcccctggtcaccagctcggggtccatgagcacccttgtgtcctcagtcaacgctgacctgcccatcgccactgcctcagctgatgtcgccgctgatattgccaagtacactagcaaaatgatggatgcaataaaaggaacaatgacagaaatatacaacgatctttctaaaaacactactggaagcacaatagctgagattcgcaggctgaggatcgagatagagaagctccagtggctgcaccagcaagagctctccgaaatgaaacacaacttagagctgaccatggcggagatgcggcagagcctggagcaggagcgggaccggctcatcgccgaggtgaagaagcagctggagttggagaagcagcaggcggtggatgagaccaagaagaagcagtggtgcgccaactgcaagaaggaggccatcttttactgctgttggaacactagctactgtgactacccctgccagcaagcccactggcctgagcacatgaagtcctgcacccagtcagctactgctcctcagcaggaagcggatgctgaggtgaacacagaaacactaaataagtcctcccaggggagctcctcgagcacacaatcagcaccttcagaaacggccagcgcctccaaagagaaggagacgtcagctgagaaaagcaaggagagtggctcgacccttgacctttctggctccagagagacgccctcctccattctcttaggctccaaccaaggctctgttagcaaaaggtgtgacaagcaacctgcctatgccccaaccaccacagaccaccagccgcaccccaactaccccgcccagaagtaccattcccggagtaataaatccagttggagcagcagtgatgagaagaggggatcgacacgttccgatcacaacaccagtaccagcacgaagagcctcctcccgaaagagtctcggctggacaccttctgggactagcagtgaatcgggacacaaaccacccaccccattgggagaaaaacccagacgccaggaaaagaagaaacaacaaaggcaggagaacagccactttcagacttgaaaatgacaaaaccctcagttgagcctgagcccccggcgcgggggctgctacactacaggacacccagcatcggctttgactgcagactgttcacccacacgagccctgtgcttttggtgtaaataatgtacaatttgtggatgtcattgaatctagaggactttcccctttttatatttgtattaactttaacttattaaaaaaaaaaaaagaaaaagaaaaacgatttaaaaaaaaaaaaaaaagcaaccaaccccaacaacaaaaaagaatgttttggtattggagaagggatggtcagttagcctgtctgtcacacgacggaatggatactgggcccggggaccactttcatactcacgtcctcatccttggatacccaggggagggcgaaccgttttcgctcgtgtgtctgtacgcagcatgttgggatcgggagtttcggcacagactatcccatcaagccgttggctcctttcagctactacgttaccacgttcctaaaacgcaagctctccggaccagacggacacagggagaagctagtttctttcatgtgattgaaatgatgactctactcctaaaagggaaaaaacaatatccttgtttacagaagagaaacaaacaagccccactcagctcagtcacaggagagaacacagaaagtcttaggatcatgaactctgaaaaaaagagaaaccttatctttgctttgtggttcctttaaacacactcacacacacttggtcagagatgctgtgcttcttggaagcaaggactcaaaggcaaggtgcacgcagaggacgtttgagtctgggatgaagcatgtacgtattatttatatgatggaatttcacgtttttatgtaagcatgaaacacaggcagtatgagagaaagcaaggcccgtcatgctgtccgtac

SEQ ID NO: 804 - DNA, 415 bp, Homo sapiens
  modified_base (89)..(89): a, c, t or g
  modified_base (129)..(129): a, c, t or g
ttttttttttttttttaaatttgaccaaaaaaaatttattgtacaattacccaccactggatttgactcagagaggacccccagaggtngtctccatcttccctatttattttcagcccttgagggttncattgtagatcaaagccaaggcccccaggaaggtgacatactcctggaagttcacctcctggtccttgttccggtccaagtcttccatcagccttgcaatttcagcatcctgcagcttcgagccaatggtgagctccttctggatcagctccttcagctccttcttgctcagggtgtgcttgtcaccctccctgccggagtacttgtggaagatggccacgaggaggccaatggctggaatccagggggcattgccatgggcttgagggctgggcttggagcggta

SEQ ID NO: 805 - DNA, 683 bp, Homo sapiens
ctgcgcagatgaggggagactcgtcaccaggcgtgcagtgggcactgctgggctcccccatcccgtcctaacccggaacagccccgggcaggaggcgtggaaagtcgagggggtaaaccgcgaatgtgcgttgtgtaagccacggcgcagggtggggcgcgggcgggacttgggcgggcggggtgggcttggccgagctggcctccggggcaccgaccgctataaggccagtcggactgcgacacagcccatcccctcgaccgctcgcgtcgcatttggccgcctccctaccgctccaagcccagccctcagccatggcatgccccctggatcaggccattggcctcctcgtggccatcttccacaagtactccggcagggagggtgacaagcacaccctgagcaagaaggagctgaaggagctgatccagaaggagctcaccattggctcgaagctgcaggatgctgaaattgcaaggctgatggaagacttggaccggaacaaggaccaggaggtgaacttccaggagtatgtcaccttcctgggggccttggctttgatctacaatgaagccctcaagggctgaaaataaatagggaagatggagacaccctctgggggtcctctctgagtcaaatccagtggtgggtaattgtacaataaattttttttggtcaaattt

SEQ ID NO: 806 - DNA, 215 bp, Homo sapiens
  modified_base (211)..(211): a, c, t or g
ttttttttttacaggattattcaatatttagtgtgtgacaataaccaatacagctggccacaaatacaacagcctctgagatgcacagaagtcagctggtgggagcagaactgtgcaggtgtgatggtgacaggccgtaagcatgcagcatccactggcatcctctgatttccaggagggataggaagtgtgccattcactgggcaaccgnatca

SEQ ID NO: 807 - DNA, 486 bp, Homo sapiens
  modified_base (334)..(334): a, c, t or g
  modified_base (401)..(401): a, c, t or g
  modified_base (411)..(411): a, c, t or g
  modified_base (470)..(470): a, c, t or g
  modified_base (483)..(483): a, c, t or g
ctcagtggaagtaaacaaacagtcatgccaggtgcagccagacatcctgctataagccctgaccctagtaccccgagttcatcaagtgctctggttttgtgtccataaagcacagagggcactgaccaccccaaaccagaatcccaaggaatccttatggatggcatagggcctcagaactgctgcaggatcattttccttttcaggtcgtggctgaacttgttcatcctgaagagctcactgtcataaaatgcagagaggttgtggatgttgatctgacgagcctgcaaggaggaagtgtccagtgagccatcagtggtgtgagaacaggctntttccagagcgccccagttacagtgcactttcagacaccatcacctccatttatggggaggaaattntccgggggtnggagaggccgatttaagggggtttcaaatttctggtgttacaagctgtgcttgttaaantgagacaagttanttg

SEQ ID NO: 808 - DNA, 3453 bp, Homo sapiens
acttttcgcgcgaaacctggttgttgctgtagtggcggagaggatcgtggtactgctatggcggaatcatcggaatccttcaccatggcatccagcccggcccagcgtcggcgaggcaatgatcctctcacctccagccctggccgaagctcccggcgtactgatgccctcacctccagccctggccgtgaccttccaccatttgaggatgagtccgaggggctcctaggcacagaggggcccctggaggaagaagaggatggagaggagctcattggagatggcatggaaagggactaccgcgccatcccagagctggacgcctatgaggccgagggactggctctggatgatgaggacgtagaggagctgacggccagtcagagggaggcagcagagcgggccatgcggcagcgtgaccgggaggctggccggggcctgggccgcatgcgccgtgggctcctgtatgacagcgatgaggaggacgaggagcgccctgcccgcaagcgccgccaggtggagcgggccacggaggacggcgaggaggacgaggagatgatcgagagcatcgagaacctggaggatctcaaaggccactctgtgcgcgagtgggtgagcatggcgggcccccggctggagatccaccaccgcttcaagaacttcctgcgcactcacgtcgacagccacggccacaacgtcttcaaggagcgcatcagcgacatgtgcaaagagaaccgtgagagcctggtggtgaactatgaggacttggcagccagggagcacgtgctggcctacttcctgcctgaggcaccggcggagctgctgcagatctttgatgaggctgccctggaggtggtactggccatgtaccccaagtacgaccgcatcaccaaccacatccatgtccgcatctcccacctgcctctggtggaggagctgcgctcgctgaggcagctgcatctgaaccagctgatccgcaccagtggggtggtgaccagctgcactggcgtcctgccccagctcagcatggtcaagtacaactgcaacaagtgcaatttcgtcctgggtcctttctgccagtcccagaaccaggaggtgaaaccaggctcctgtcctgagtgccagtcggccggcccctttgaggtcaacatggaggagaccatctatcagaactaccagcgtatccgaatccaggagagtccaggcaaagtggcggctggccggctgccccgctccaaggacgccattctcctcgcagatctggtggacagctgcaagccaggagacgagatagagctgactggcatctatcacaacaactatgatggctccctcaacactgccaatggcttccctgtctttgccactgtcatcctagccaaccacgtggccaagaaggacaacaaggttgctgtaggggaactgaccgatgaagatgtgaagatgatcactagcctctccaaggatcagcagatcggagagaagatctttgccagcattgctccttccatctatggtcatgaagacatcaagagaggcctggctctggccctgttcggaggggagcccaaaaacccaggtggcaagcacaaggtacgtggtgatatcaacgtgctcttgtgcggagaccctggcacagcgaagtcgcagtttctcaagtatattgagaaagtgtccagccgagccatcttcaccactggccagggggcgtcggctgtgggcctcacggcgtatgtccagcggcaccctgtcagcagggagtggaccttggaggctggggccctggttctggctgaccgaggagtgtgtctcattgatgaatttgacaagatgaatgaccaggacagaaccagcatccatgaggccatggagcaacagagcatctccatctcgaaggctggcatcgtcacctccctgcaggctcgctgcacggtcattgctgccgccaaccccataggagggcgctacgacccctcgctgactttctctgagaacgtggacctcacagagcccatcatctcacgctttgacatcctgtgtgtggtgagggacaccgtggacccagtccaggacgagatgctggcccgcttcgtggtgggcagccacgtcagacaccaccccagcaacaaggaggaggaggggctggccaatggcagcgctgctgagcccgccatgcccaacacgtatggcgtggagcccctgccccaggaggtcctgaagaagtacatcatctacgccaaggagagggtccacccgaagctcaaccagatggaccaggacaaggtggccaagatgtacagtgacctgaggaaagaatctatggcgacaggcagcatccccattacggtgcggcacatcgagtccatgatccgcatggcggaggcccacgcgcgcatccatctgcgggactatgtgatcgaagacgacgtcaacatggccatccgcgtgatgctggagagcttcatagacacacagaagttcagcgtcatgcgcagcatgcgcaagacttttgcccgctacctttcattccggcgtgacaacaatgagctgttgctcttcatactgaagcagttagtggcagagcaggtgacatatcagcgcaaccgctttggggcccagcaggacactattgaggtccctgagaaggacttggtggataaggctcgtcagatcaacatccacaacctctctgcattttatgacagtgagctcttcaggatgaacaagttcagccacgacctgaaaaggaaaatgatcctgcagcagttctgaggccctatgccatccataaggattccttgggattctggtttggggtggtcagtgccctctgtgctttatggacacaaaaccagagcacttgatgaactcggggtactagggtcagggcttatagcaggatgtctggctgcacctggcatgactgtttgtttctccaagcctgctttgtgcttctcacctttgggtgggatgccttgccagtgtgtcttacttggttgctgaacatcttgccacctccgagtgctttgtctccactcagtaccttggatcagagctgctgagttcaggatgcctgcgtgtggtttaggtgttagccttcttacatggatgtcaggagagctgctgccctcttggcgtgagttgcgtattcaggctgcttttgctgcctttggccagagagctggttgaagatgtttgtaatcgttttcagtctcctgcaggtttctgtgcccctgtggtggaagagggcacgacagtgccagcgcagcgttctgggctcctcagtcgcaggggtgggatgtgagtcatgcggattatccactcgccacagttatcagctgccattgctccctgtctgtttccccactctcttatttgtgcattcggtttggtttctgtagttttaatttttaataaagttgaataaaatataaaaaaaaaaaaaaaaaaaaa

SEQ ID NO: 809 - DNA, 298 bp, Homo sapiens
  modified_base (2)..(2): a, c, t or g
  modified_base (6)..(6): a, c, t or g
  modified_base (16)..(18): a, c, t or g
  modified_base (23)..(23): a, c, t or g
  modified_base (107)..(107): a, c, t or g
  modified_base (272)..(272): a, c, t or g
  modified_base (287)..(287): a, c, t or g
anacanaaaagataannncatgnactcatctgtaggccttttaaaaactgaaaaaccagttcaactaaattttgacatgattgtctggaagctagtagtattaattnttttttcatagtaaaacagatgtaataattgattcatatagtctacaagagaagatattgggtgtttttttgtaggtggcaaatataaaatggttaattgtatccaggcttgcagcaagtttatccatgcattaaatggcaacatgagtatgaatacatggttgnaaaatttaggctcanacacatgtctt

SEQ ID NO: 810 - DNA, 4878 bp, Homo sapiens
tcttgggcccgggcggctgtagaggcggcggcgcctacgggcagtgggaggagccgcgcggttccggctgctccggcgaggcgacccttgggtcggcgctgcgggcgaggtgggcaggtaggtgggcggacggccgcggttctccggcaagcgcaggcggcggagtcccccacggcgcccgaagcgcccccccgcacccccggcctccagcgttgaggcgggggagtgaggagatgccgacccagagggacagcagcaccatgtcccacacggtcgcaggcggcggcagcggggaccattcccaccaggtccgggtgaaagcctactaccgcggggatatcatgataacacattttgaaccttccatctcctttgagggcctttgcaatgaggttcgagacatgtgttcttttgacaacgaacagctcttcaccatgaaatggatagatgaggaaggagacccgtgtacagtatcatctcagttggagttagaagaagcctttagactttatgagctaaacaaggattctgaactcttgattcatgtgttcccttgtgtaccagaacgtcctgggatgccttgtccaggagaagataaatccatctaccgtagaggtgcacgccgctggagaaagctttattgtgccaatggccacactttccaagccaagcgtttcaacaggcgtgctcactgtgccatctgcacagaccgaatatggggacttggacgccaaggatataagtgcatcaactgcaaactcttggttcataagaagtgccataaactcgtcacaattgaatgtgggcggcattctttgccacaggaaccagtgatgcccatggatcagtcatccatgcattctgaccatgcacagacagtaattccatataatccttcaagtcatgagagtttggatcaagttggtgaagaaaaagaggcaatgaacaccagggaaagtggcaaagcttcatccagtctaggtcttcaggattttgatttgctccgggtaataggaagaggaagttatgccaaagtactgttggttcgattaaaaaaaacagatcgtatttatgcaatgaaagttgtgaaaaaagagcttgttaatgatgatgaggatattgattgggtacagacagagaagcatgtgtttgagcaggcatccaatcatcctttccttgttgggctgcattcttgctttcagacagaaagcagattgttctttgttatagagtatgtaaatggaggagacctaatgtttcatatgcagcgacaaagaaaacttcctgaagaacatgccagattttactctgcagaaatcagtctagcattaaattatcttcatgagcgagggataatttatagagatttgaaactggacaatgtattactggactctgaaggccacattaaactcactgactacggcatgtgtaaggaaggattacggccaggagatacaaccagcactttctgtggtactcctaattacattgctcctgaaattttaagaggagaagattatggtttcagtgttgactggtgggctcttggagtgctcatgtttgagatgatggcaggaaggtctccatttgatattgttgggagctccgataaccctgaccagaacacagaggattatctcttccaagttattttggaaaaacaaattcgcataccacgttctctgtctgtaaaagctgcaagtgttctgaagagttttcttaataaggaccctaaggaacgattgggttgtcatcctcaaacaggatttgctgatattcagggacacccgttcttccgaaatgttgattgggatatgatggagcaaaaacaggtggtacctccctttaaaccaaatatttctggggaatttggtttggacaactttgattctcagtttactaatgaacctgtccagctcactccagatgacgatgacattgtgaggaagattgatcagtctgaatttgaaggttttgagtatatcaatcctcttttgatgtctgcagaagaatgtgtctgatcctcatttttcaaccatgtattctactcatgttgccatttaatgcatggataaacttgctgcaagcctggatacaattaaccattttatatttgccacctacaaaaaaacacccaatatcttctcttgtagactatatgaatcaattattacatctgttttactatgaaaaaaaaattaatactactagcttccagacaatcatgtcaaaatttagttgaactggtttttcagtttttaaaaggcctacagatgagtaatgaagttatcttttttgtttaaaaaaaaaaaaaacactgcattaaaaaagtatctgttgcattaaggcacatagtgggattacatcataaacctcccataatttttgtcattctgtgttaaatcatttcagggtttaattttgaaataaaagattaatataaaatgcaacaactttttatattacctattagttttggagttctttatgtttaaaaattcaggtgtaaattttattgccttggataaataaattattgatcttttttaaggcagcagttattaaattggtaatagaagatgctgcttgcttagaattgggaaattcggctgggtgcagtgactcaatgcctgtgatcccagtactttgggaggttgaggcgggcagatcacttgaggtcaggagtttgagattggcctggtcaacatggtgaaatcctgtctctactaaaaatacaaaaattagctgggcatggtggcacatacctgtaatcccagctactcgggaggctgaaacaggagaatcgcttgaacccaggagatggagttggcagtgagccaagattagcctgggcaacagtgagtgagactcggtctcaaacaaaaaccaaattgggaaattcttcttgagttaaaaaagacactttttattatgaatcagattccaaatcattaactatttttgcaaaactggcacaagtggtttttctttttaagtatattaacagggtagctcctgagcctttccctttattggaaactttaactgcagtgttaatatatacactgcaaaagaccaaggatgcagttgaatggaaaattactcagtgtatagaaaggaaaaaaaccagaaatttaaaatagatacagaaaagtacactggtaatatttttatttcctattggagagtgaatccccacagttgctttttgtgacttgattcaaatgaggcactcattattgttaccaaacttgtaaaagcattccatgtattcagtggaggcagaatgtataatattttttccttataatttagcatacaggaaaagtatttattttttaagtagggtatcttaattatgctcatttcttcccctaaaccacattatctatatgattggaccctttagtgaaatcagaaaaataaagtaggcatgaataaatgttcaggacacacacatacactcacacacatcacagtatcagctctttcagtgagtttttattaactagataacacatgtaatacatagtagaatacatttcagaggcagagttcctcggattattttttatggatattagtgttcagcagcttattatttaaaggggtgccaaatatagcatccttctgttgtttattttaaatatatttttaatgaaaagggacttaaaaagtaaacatgattatctaaattacttaaaattttttaatcttagtaaaaattttaggaaagttatctagtttaaatttcaaatgttttaaaatttgtaggcatttaataaattatctttttttggaggggtggatgctgcatttcattggaaatgtcatttttccaaagtttctagctatatactctctttccttcaaataacataagtctgaaagcaatgaaaacgtcaaaggaaaatgtttatatacatccacatgtttatttaatatgtttctcttaacacctgaaacttgttttaaaacaaaaagcagtattcacttcaaatcataaacttagaattctgtatctcatgtcagaaatatgtttatggccttgcttttaagtggtgctgtttcccatagggcattagttctcagattttggaatgtgaaataatcacctaggaagttggtttaaaatgcacactagtgagcccaccttagacttcttttggggccttcgacctcactttgagaaataccttcttcaggttattctttatgtttgtcctgtggttaaatattagagtattcatgataaaacattttgagaaggggtaagcagtgagttattacccacaatttaaagcaaattttgaatgaatctttaagttaggtatctaccttcccaccagccccccaaaaaacctctcagtagtttctttcagtgtacaaaatgatgagcatttttctatgatgaggttttaaccattattcagggtggtcttttgtttttaaatctttttttaactaataagatttacggtgtgtattttatacagaaatgcattataaatgtttttaattgtgttctgttttttgcagtctttaagtgccatgccaattgttcttatattctatagaagttcgctcaaaatactcaacaggggaataggcagcggacagtcagaatggttggaattttggctttctaagaaaaactttattttgcataagcatgtggtcagatcattttgtgcatatgcagcctggattggatgttaagtaaatgcttgttcagtgccggtacatttacttaaatctgtttttatttttgtcatgtagaatactactgtggtcatcataatgtaatctatttctgtaccttttttttttttttttactttgaagtctttaaataaaatgtataatacccaaaaa

SEQ ID NO: 811 - DNA, 395 bp, Homo sapiens
  modified_base (322)..(322): a, c, t or g
  modified_base (328)..(328): a, c, t or g
  modified_base (359)..(359): a, c, t or g
ttttttttttccatgtattatagtttattaactttctttttcacgctcactggggttaaggtgcggaaagcatttcacagggagtcttaaaaccaaattaggattgccaggtaaaggctgcacaaggaaaatgccttatctctgaagcccagagctggcaggggagggcatgacccagggactccaccctcctgcaaagggaaagggcatgctggagaggcatggggacccactccaactcactctgggtgctgtctgtagttctggaagcttggtggaggatttcctgctcaacttagagggtgggccaatggggccaggncggggnaaggtgagggttggaagggcagaaggaagtnacaaaggccaccttcagcacagcagttagaaggaag

SEQ ID NO: 812 - DNA, 497 bp, Homo sapiens
  modified_base (457)..(457): a, c, t or g
  modified_base (471)..(471): a, c, t or g
  modified_base (484)..(484): a, c, t or g
tcatctggggcgctctatggcctgttcctgactgcggctgcacagccctgaaggccaagaccagcctcccagcctggtctgctgccatggatgccggcctggaagccatgcagaagtatggcaaggctgctccaggggacaggactatgctggattctctgtgggcagcggggcaggagctccaagcctggaagagcccaggagctgatctgttacaagtcctgaccaaagcagtcaaggtgagtgaggctgggcccagccacctggggagacaggcttctagccagcagactcctgtctccatgtgaccctgagcaagttaataaccttcctggaccgcagtttccttcttctgttacaatggagatgagcacctattttcagaaggtggttatgtgggcttaaggaaatatgttagagccccgcacattgcctggggattttgacagggcctcanttgaattggttgancctttttccctgnttggaagttagat

SEQ ID NO: 813 - DNA, 2210 bp, Homo sapiens
agcagctcagtgcaacggtgtgaactcagcctgtttcagagcctccacaccatgacctccaagaagctggtgaactcggtggctggctgtgctgatgacgctcttgctggcctggtggcctgcaaccccaacctgcagctcctgcagggccaccgcgtggccctccgttctgacctggacagcctcaagggccgggtggcactgctgtcgggtgggggctctggccatgagcctgcccatgctggtttcatagggaaggggatgctgactggggtcatcgcgggagctgtgttcacctccccggcagtgggcagcatcctggcagccatcagggccgtggcccaggccggcacagtggggacgctccttatcgtgaagaactacactggggatcggctcaacttcggcctggcccgggagcaggcccgggctgaaggcatcccggtggagatggtggtgattggggacgacagcgccttcactgtcctgaagaaggcaggccggcgggggctgtgcggcacggtgcttatacacaaggtggcaggtgctctggctgaggctggtgtggggctggaggagatcgcaaagcaggtgaacgtggtcgccaaggccatgggtaccctgggggtgagcttatcctcctgcagcgtccctggttccaaacccaccttcgagctctcagccgacgaggtggagctgggcctggggatccacggggaagctggtgtgcgccggataaagatggcaaccgccgatgagattgtgaaactcatgctcgaccacatgacaaacaccaccaacgcgtcccatgtgcctgtgcagcccggctcctcagttgtgatgatggtcaacaacctgggtggcctgtcattcctggaactgggcatcatagccgacgctaccgtccgctccctggagggccgcggggtgaagattgcccgtgccctggtgggcaccttcatgtcagcactggagatgcctggcatttctctcaccctcctgctggtggatgagcctctcctgaaactgatagatgctgaaaccactgcagcagcctggcctaacgtggctgcagtctccattactgggcggaagcggagccgggtagcccctgccgagccccaggaggcccctgattccactgctgcaggaggctcagcctcgaagcggatggcgctggtgctggaacgggtgtgcagcactctcctgggcctggaggaacacctgaatgccctggaccgggctgctggtgacggcgactgtggcaccacccacagccgtgcggccagagcaatccaggagtggctgaaggagggcccaccccctgccagccctgcccagctgctctccaagttgtctgtcctgctcctggagaagatgggaggctcatctggggcgctctatggcctgttcctgactgcggctgcacagcccctgaaggccaagaccagcctcccagcctggtctgctgccatggatgccggcctggaagccatgcagaagtatggcaaggctgctccaggggacaggactatgctggattctctgtgggcagcggggcaggagctccaagcctggaagagcccaggagctgatctgttacaagtcctgaccaaagcagtcaagagtgccgaagctgcagccgaggccaccaagaatatggaagctggagccggaagagccagttatatcagctcagcacggctggagcagccagaccccggggcggtggcagctgctgccatcctccgggccatcttggaggtcttgcagagctagggtgtgtgactgcctcccttggcctcagctcctctcactgctgtgctgaggtggcctttgtcacttccttctgccttccaaccctcaccttcccccggcctggccccattggcccaccctctaagttgagcaggaaatcctccaccaagcttccagaactacagacagcacccagagtgagctggagtgggtccccatgcctctccagcatgccctttccctttgcaggagggtggagtccctgggtcatgccctcccctgccagctctgggcttcagagataaggcattttccttgtgcagcctttacctggcaatcctaatttggttttaagactccctgtgaaatgctttccgcaccttaaccccagtgagcgtgaaaaagaaagttaataaactataatacatggaagcaagaaaaaaaaaaaaaaa

SEQ ID NO: 814 - DNA, 420 bp, Homo sapiens
  modified_base (261)..(261): a, c, t or g
  modified_base (313)..(313): a, c, t or g
  modified_base (382)..(382): a, c, t or g
  modified_base (399)..(399): a, c, t or g
  modified_base (410)..(410): a, c, t or g
  modified_base (415)..(415): a, c, t or g
ttttttttggcggggggagacatggaatctcactatgttgcccattctggttttgaactcctggcctccagcaatcctccctgctaagtgtcccaaagtgctgggattacaagcatgagctaccatgcccagccacaaatctcaattaagagctggattttattttggaaaagccgtcaatactcaatcaagtaaagcctttgtcaaaatgacgtggggcttaacaaaagagatataattatttgtatagcacatagactntttcacattatatcattaggaaaccaactttgggtaaagttttactacacgngtccatctactctgggtcattttgagggctctctcccctttctaccacatttttttgttctgttttgangtttttttttcagaganagagttttgcntcagncaccc

SEQ ID NO: 815 - DNA, 7193 bp, Homo sapiens
agaataagggcagggaccgcggctcctatctcttggtgatccccttccccattccgcccccgcctcaacgcccagcacagtgccctgcacacagtagtcgctcaataaatgttcgtggatgatgatgatgatgatgatgaaaaaaatgcagcatcaacggcagcagcaagcggaccacgcgaacgaggcaaactatgcaagaggcaccagacttcctctttctggtgaaggaccaacttctcagccgaatagctccaagcaaactgtcctgtcttggcaagctgcaatcgatgctgctagacaggccaaggctgcccaaactatgagcacctctgcacccccacctgtaggatctctctcccaaagaaaacgtcagcaatacgccaagagcaaaaaacagggtaactcgtccaacagccgacctgcccgcgcccttttctgtttatcactcaataaccccatccgaagagcctgcattagtatagtggaatggaaaccatttgacatatttatattattggctatttttgccaattgtgtggccttagctatttacatcccattccctgaagatgattctaattcaacaaatcataacttggaaaaagtagaatatgccttcctgattatttttacagtcgagacatttttgaagattatagcgtatggattattgctacatcctaatgcttatgttaggaatggatggaatttactggattttgttatagtaatagtaggattgtttagtgtaattttggaacaattaaccaaagaaacagaaggcgggaaccactcaagcggcaaatctggaggctttgatgtcaaagccctccgtgcctttcgagtgttgcgaccacttcgactagtgtcaggggtgcccagtttacaagttgtcctgaactccattataaaagccatggttcccctccttcacatagcccttttggtattatttgtaatcataatctatgctattataggattggaactttttattggaaaaatgcacaaaacatgtttttttgctgactcagatatcgtagctgaagaggacccagctccatgtgcgttctcagggaatggacgccagtgtactgccaatggcacggaatgtaggagtggctgggttggcccgaacggaggcatcaccaactttgataactttgcctttgccatgcttactgtgtttcagtgcatcaccatggagggctggacagacgtgctctactgggtaaatgatgcgataggatgggaatggccatgggtgtattttgttagtctgatcatccttggctcatttttcgtccttaacctggttcttggtgtccttagtggagaattctcaaaggaaagagagaaggcaaaagcacggggagatttccagaagctccgggagaagcagcagctggaggaggatctaaagggctacttggattggatcacccaagctgaggacatcgatccggagaatgaggaagaaggaggagaggaaggcaaacgaaatactagcatgcccaccagcgagactgagtctgtgaacacagagaacgtcagcggtgaaggcgagaaccgaggctgctgtggaagtctctggtgctggtggagacggagaggcgcggccaaggcggggccctctgggtgtcggcggtggggtcaagccatctcaaaatccaaactcagccgacgctggcgtcgctggaaccgattcaatcgcagaagatgtagggccgccgtgaagtctgtcacgttttactggctggttatcgtcctggtgtttctgaacaccttaaccatttcctctgagcactacaatcagccagattggttgacacagattcaagatattgccaacaaagtcctcttggctctgttcacctgcgagatgctggtaaaaatgtacagcttgggcctccaagcatatttcgtctctcttttcaaccggtttgattgcttcgtggtgtgtggtggaatcactgagacgatcctggtggaactggaaatcatgtctcccctggggatctctgtgtttcggtgtgtgcgcctcttaagaatcttcaaagtgaccaggcactggacttccctgagcaacttagtggcatccttattaaactccatgaagtccatcgcttcgctgttgcttctgctttttctcttcattatcatcttttccttgcttgggatgcagctgtttggcggcaagtttaattttgatgaaacgcaaaccaagcggagcacctttgacaatttccctcaagcacttctcacagtgttccagatcctgacaggcgaagactggaatgctgtgatgtacgatggcatcatggcttacgggggcccatcctcttcaggaatgatcgtctgcatctacttcatcatcctcttcatttgtggtaactatattctactgaatgtcttcttggccatcgctgtagacaatttggctgatgctgaaagtctgaacactgctcagaaagaagaagcggaagaaaaggagaggaaaaagattgccagaaaagagagcctagaaaataaaaagaacaacaaaccagaagtcaaccagatagccaacagtgacaacaaggttacaattgatgactatagagaagaggatgaagacaaggacccctatccgccttgcgatgtgccagtaggggaagaggaagaggaagaggaggaggatgaacctgaggttcctgccggaccccgtcctcgaaggatctcggagttgaacatgaaggaaaaaattgcccccatccctgaagggagcgctttcttcattcttagcaagaccaacccgatccgcgtaggctgccacaagctcatcaaccaccacatcttcaccaacctcatccttgtcttcatcatgctgagcagcgctgccctggccgcagaggaccccatccgcagccactccttccggaacacgatactgggttactttgactatgccttcacagccatctttactgttgagatcctgttgaagatgacaacttttggagctttcctccacaaaggggccttctgcaggaactacttcaatttgctggatatgctggtggttggggtgtctctggtgtcatttgggattcaatccagtgccatctccgttgtgaagattctgagggtcttaagggtcctgcgtcccctcagggccatcaacagagcaaaaggacttaagcacgtggtccagtgcgtcttcgtggccatccggaccatcggcaacatcatgatcgtcactaccctcctgcagttcatgtttgcctgtatcggggtccagttgttcaaggggaagttctatcgctgtacggatgaagccaaaagtaaccctgaagaatgcaggggacttttcatcctctacaaggatggggatgttgacagtcctgtggtccgtgaacggatctggcaaaacagtgatttcaacttcgacaacgtcctctctgctatgatggcgctcttcacagtctccacgtttgagggctggcctgcgttgctgtataaagccatcgactcgaatggagagaacatcggcccaatctacaaccaccgcgtggagatctccatcttcttcatcatctacatcatcattgtagctttcttcatgatgaacatctttgtgggctttgtcatcgttacatttcaggaacaaggagaaaaagagtataagaactgtgagctggacaaaaatcagcgtcagtgtgttgaatacgccttgaaagcacgtcccttgcggagatacatccccaaaaacccctaccagtacaagttctggtacgtggtgaactcttcgcctttcgaatacatgatgtttgtcctcatcatgctcaacacactctgcttggccatgcagcactacgagcagtccaagatgttcaatgatgccatggacattctgaacatggtcttcaccggggtgttcaccgtcgagatggttttgaaagtcatcgcatttaagcctaaggggtattttagtgacgcctggaacacgtttgactccctcatcgtaatcggcagcattatagacgtggccctcagcgaagcggacccaactgaaagtgaaaatgtccctgtcccaactgctacacctgggaactctgaagagagcaatagaatctccatcacctttttccgtcttttccgagtgatgcgattggtgaagcttctcagcaggggggaaggcatccggacattgctgtggacttttattaagtcctttcaggcgctcccgtatgtggccctcctcatagccatgctgttcttcatctatgcggtcattggcatgcagatgtttgggaaagttgccatgagagataacaaccagatcaataggaacaataacttccagacgtttccccaggcggtgctgctgctcttcaggtgtgcaacaggtgaggcctggcaggagatcatgctggcctgtctcccagggaagctctgtgaccctgagtcagattacaaccccggggaggagtatacatgtgggagcaactttgccattgtctatttcatcagtttttacatgctctgtgcatttctgatcatcaatctgtttgtggctgtcatcatggataatttcgactatctgacccgggactggtctattttggggcctcaccatttagatgaattcaaaagaatatggtcagaatatgaccctgaggcaaagggaaggataaaacaccttgatgtggtcactctgcttcgacgcatccagcctcccctggggtttgggaagttatgtccacacagggtagcgtgcaagagattagttgccatgaacatgcctctcaacagtgacgggacagtcatgtttaatgcaaccctgtttgctttggttcgaacggctcttaagatcaagaccgaagggaacctggagcaagctaatgaagaacttcgggctgtgataaagaaaatttggaagaaaaccagcatgaaattacttgaccaagttgtccctccagctggtgatgatgaggtaaccgtggggaagttctatgccactttcctgatacaggactactttaggaaattcaagaaacggaaagaacaaggactggtgggaaagtaccctgcgaagaacaccacaattgccctacaggcgggattaaggacactgcatgacattgggccagaaatccggcgtgctatatcgtgtgatttgcaagatgacgagcctgaggaaacaaaacgagaagaagaagatgatgtgttcaaaagaaatggtgccctgcttggaaaccatgtcaatcatgttaatagtgataggagagattcccttcagcagaccaataccacccaccgtcccctgcatgtccaaaggccttcaattccacctgcaagtgatactgagaaaccgctgtttcctccagcaggaaattcggtgtgtcataaccatcataaccataattccataggaaagcaagttcccacctcaacaaatgccaatctcaataatgccaatatgtccaaagctgcccatggaaagcggcccagcattgggaaccttgagcatgtgtctgaaaatgggcatcattcttcccacaagcatgaccgggagcctcagagaaggtccagtgtgaaaagaacccgctattatgaaacttacattaggtccgactcaggagatgaacagctcccaactatttgccgggaagacccagagatacatggctatttcagggacccccactgcttgggggagcaggagtatttcagtagtgaggaatgctacgaggatgacagctcgcccacctggagcaggcaaaactatggctactacagcagatacccaggcagaaacatcgactctgagaggccccgaggctaccatcatccccaaggattcttggaggacgatgactcgcccgtttgctatgattcacggagatctccaaggagacgcctactacctcccaccccagcatcccaccggagatcctccttcaactttgagtgcctgcgccggcagagcagccaggaagaggtcccgtcgtctcccatcttcccccatcgcacggccctgcctctgcatctaatgcagcaacagatcatggcagttgccggcctagattcaagtaaagcccagaagtactcaccgagtcactcgacccggtcgtgggccacccctccagcaacccctccctaccgggactggacaccgtgctacacccccctgatccaagtggagcagtcagaggccctggaccaggtgaacggcagcctgccgtccctgcaccgcagctcctggtacacagacgagcccgacatctcctaccggactttcacaccagccagcctgactgtccccagcagcttccggaacaaaaacagcgacaagcagaggagtgcggacagcttggtggaggcagtcctgatatccgaaggcttgggacgctatgcaagggacccaaaatttgtgtcagcaacaaaacacgaaatcgctgatgcctgtgacctcaccatcgacgagatggagagtgcagccagcaccctgcttaatgggaacgtgcgtccccgagccaacggggatgtgggccccctctcacaccggcaggactatgagctacaggactttggtcctggctacagcgacgaagagccagaccctgggagggatgaggaggacctggcggatgaaatgatatgcatcaccaccttgtagcccccagcgaggggcagactggctctggcctcaggtggggcgcaggagagccaggggaaaagtgcctcatagttaggaaagtttaggcactagttgggagtaatattcaattaattagacttttgtataagagatgtcatgcctcaagaaagccataaacctggtaggaacaggtcccaagcggttgagcctggcagagtaccatgcgctcggccccagctgcaggaaacagcaggccccgccctctcacagaggatgggtgaggaggccagacctgccctgccccattgtccagatgggcactgctgtggagtctgcttctcccatgtaccagggcaccaggcccacccaactgaaggcatggcggcggggtgcaggggaaagttaaaggtgatgacgatcatcacacctcgtgtcgttacctcagccatcggtctagcatatcagtcactgggcccaacatatccatttttaaaccctttcccccaaatacactgcgtcctggttcctgtttagctgttctgaaata

SEQ ID NO: 816 - DNA, 353 bp, Homo sapiens
  modified_base (56)..(56): a, c, t or g
  modified_base (136)..(136): a, c, t or g
  modified_base (198)..(198): a, c, t or g
  modified_base (211)..(211): a, c, t or g
  modified_base (221)..(221): a, c, t or g
  modified_base (247)..(247): a, c, t or g
  modified_base (253)..(253): a, c, t or g
  modified_base (278)..(278): a, c, t or g
  modified_base (292)..(292): a, c, t or g
tttttttttagttatcatacatttatttttaacatagcaccccagtttcacatcangtatattttccaaagttggagatctttaactatgttcttcacagacctttcaacaagtgtgaaaaagaggcagtaaggtnagcttgagtctacaagtcacaatccaaatataggacacctatgtttaaggtcaatatacatnatgttcccaatgncttagcaaangaatgaggactctgggctgggtaaantattancacaacttgttaggcacattatcanggaaaaggacagangggcatccaaatatatactttgctgttacactttgttactgttcaatgtacttgtaggtgg

SEQ ID NO: 817 - DNA, 369 bp, Homo sapiens
  modified_base (33)..(33): a, c, t or g
  modified_base (143)..(143): a, c, t or g
  modified_base (148)..(148): a, c, t or g
  modified_base (227)..(227): a, c, t or g
  modified_base (243)..(243): a, c, t or g
  modified_base (255)..(255): a, c, t or g
aatgtcttcttttaagcagtagttggaaacatntcaattacagtgtaacaccttagagctaaaaacatttgttcaacacaaactagaatcacaccttctcactagatatcaccaagggaatgtggttttaaaaataaaaaganaacantataacgtatcatggcaaccagagcttcccatattattgacaagtagggatcattaggttctggtttgaacattctgantgtgaacaaaatgaantagtagttaagnggtgttttcccactgtgtttaaagagaacactagtaattctggtttttctttctaactgctttactgtttcaagggtattcttttaaaactctggatttcaaaggatcagttga

SEQ ID NO: 818 - DNA, 489 bp, Homo sapiens
  modified_base (19)..(19): a, c, t or g
  modified_base (31)..(31): a, c, t or g
  modified_base (34)..(34): a, c, t or g
  modified_base (36)..(36): a, c, t or g
  modified_base (61)..(61): a, c, t or g
ttttttttttttttcaaanccattttattcnaantnagaacctacagggtgttatgggccngcatatgccttcagttatgttgaaaatagctgatctctttccgtacattctgaacatttctcagtttagagtgctggccacaccaaagcatcagccctggctctaaactccgttacagtaaggaattacaaatcctgtgtttgtactccaggaagtctgcattatcacgaggagcttggaaaggaggtaacacactcaaggcaaatttcaagtaactcatcctggaggcagctgcctactctgcagctgtggttctccaccacagagagaagaaaagggagggagatggagtgcgcaggtctgagaaggctttcattctggagcatctgcaggagcctgcaccatggcccagtagcacccctttttctccatgagctgctggtgggttcccccctcccggatagcgcctccttccagaaagaggatgt

SEQ ID NO: 819 - DNA, 498 bp, Homo sapiens
  modified_base (270)..(270): a, c, t or g
  modified_base (359)..(359): a, c, t or g
  modified_base (440)..(440): a, c, t or g
  modified_base (465)..(465): a, c, t or g
  modified_base (492)..(492): a, c, t or g
tgggaacttgtcacatttgttctctaccagatgcagttcacccaggctgtggaggtactgctctccatctaccccagagtacagaaggctgtgggctcctcagagaaaatatttgagtacctggaccgcacccctcgctgcccacccagtggtctgttgactcccttacacttggagggccttgtccagttccaagatgtctcctttgcctacccaaaccgcccagatgtcttagtgctacaggggctgacattcaccctacgccctggnaggtgacggcgctggtgggacccaatgggtcttggggaagagcacagtggctgccctgctgcagaatctgtaaccagcccaccgggggnacagcttgctgttgggatggggaagcccctttccccaatatggaggcaccgttaccttgcacaggcagttgggttgcagtngggacaaggagccacaggtattttnggaagaagtttttcaagaaatttttgnctattg

SEQ ID NO: 820 - DNA, 2974 bp, Homo sapiens
gtgtgcgtgatggagaaaattgggcaccagggctgctcccgagattctcagatctgatttccacgcttgctaccaaaatagtctgggcaggccacttttggaagtaggcgttatctagtgagcaggcggccgctttcgatttcgctttcccctaaatggctgagcttctcgccagcgcaggatcagcctgttcctgggactttccgagagccccgccctcgttccctcccccagccgccagtaggggaggactcggcggtacccggagcttcaggccccaccggggcgcggagagtcccaggcccggccgggaccgggacggcgtccgagtgccaatggctagctctaggtgtcccgctccccgcgggtgccgctgcctccccggagcttctctcgcatggctggggacagtactgctacttctcgccgactgggtgctgctccggaccgcgctgccccgcatattctccctgctggtgcccaccgcgctgccactgctccgggtctgggcggtgggcctgagccgctgggccgtgctctggctgggggcctgcggggtcctcagggcaacggttggctccaagagcgaaaacgcaggtgcccagggctggctggctgctttgaagccattagctgcggcactgggcttggccctgccgggacttgccttgttccgagagctgatctcatggggagcccccgggtccgcggatagcaccaggctactgcactggggaagtcaccctaccgccttcgttgtcagttatgcagcggcactgcccgcagcagccctgtggcacaaactcgggagcctctgggtgcccggcggtcagggcggctctggaaaccctgtgcgtcggcttctaggctgcctgggctcggagacgcgccgcctctcgctgttcctggtcctggtggtcctctcctctcttggggagatggccattccattctttacgggccgcctcactgactggattctacaagatggctcagccgataccttcactcgaaacttaactctcatgtccattctcaccatagccagtgcagtgctggagttcgtgggtgacgggatctataacaacaccatgggccacgtgcacagccacttgcagggagaggtgtttggggctgtcctgcgccaggagacggagtttttccaacagaaccagacaggtaacatcatgtctcgggtaacagaggacacgtccaccctgagtgattctctgagtgagaatctgagcttatttctgtggtacctggtgcgaggcctatgtctcttggggatcatgctctggggatcagtgtccctcaccatggtcaccctgatcaccctgcctctgcttttccttctgcccaagaaggtgggaaaatggtaccagttgctggaagtgcaggtgcgggaatctctggcaaagtccagccaggtggccattgaggctctgtcggccatgcctacagttcgaagctttgccaacgaggagggcgaagcccagaagtttagggaaaagctgcaagaaataaagacactcaaccagaaggaggctgtggcctatgcagtcaactcctggaccactagtatttcaggtatgctgctgaaagtgggaatcctctacattggtgggcagctggtgaccagtggggctgtaagcagtgggaaccttgtcacatttgttctctaccagatgcagttcacccaggctgtggaggtactgctctccatctaccccagagtacagaaggctgtgggctcctcagagaaaatatttgagtacctggaccgcacccctcgctgcccacccagtggtctgttgactcccttacacttggagggccttgtccagttccaagatgtctcctttgcctacccaaaccgcccagatgtcttagtgctacaggggctgacattcaccctacgccctggcgaggtgacggcgctggtgggacccaatgggtctgggaagagcacagtggctgccctgctgcagaatctgtaccagcccaccgggggacagctgctgttggatgggaagccccttccccaatatgagcaccgctacctgcacaggcaggtggctgcagtgggacaagagccacaggtatttggaagaagtcttcaagaaaatattgcctatggcctgacccagaagccaactatggaggaaatcacagctgctgcagtaaagtctggggcccatagtttcatctctggactccctcagggctatgacacagaggtagacgaggctgggagccagctgtcagggggtcagcgacaggcagtggcgttggcccgagcattgatccggaaaccgtgtgtacttatcctggatgatgccaccagtgccctggatgcaaacagccagttacaggtggagcagctcctgtacgaaagccctgagcggtactcccgctcagtgcttctcatcacccagcacctcagcctggtggagcaggctgaccacatcctctttctggaaggaggcgctatccgggaggggggaacccaccagcagctcatggagaaaaaggggtgctactgggccatggtgcaggctcctgcagatgctccagaatgaaagccttctcagacctgcgcactccatctccctcccttttcttctctctgtggtggagaaccacagctgcagagtaggcagctgcctccaggatgagttacttgaaatttgccttgagtgtgttacctcctttccaagctcctcgtgataatgcagacttcctggagtacaaacacaggatttgtaattccttactgtaacggagtttagagccagggctgatgctttggtgtggccagcactctgaaactgagaaatgttcagaatgtacggaaagatgatcagctattttcaacataactgaaggcatatgctggcccataaacaccctgtaggttcttgatatttataataaaattggtgttttgtaaaaaaaaaaaaaaaaaaaaaaa

SEQ ID NO: 821 - DNA, 393 bp, Homo sapiens
  modified_base (11)..(11): a, c, t or g
  modified_base (174)..(174): a, c, t or g
  modified_base (348)..(348): a, c, t or g
ttttttttttnttttttttaaggattttaaaaatatatctattttgaaaatattctgaaagtaattaagatcacctattgggaaggaaagaaatcaacacaatgaaatttaggaagagaaatgcaaaagcagctgcagaatcctgccccttccaccccaaggggcacagccggnaggatgaagcttattttaggatcacaagtgcacgctctggtaggacggaggatgactttgtcagtcttctgggctgaagggccttgtccaaagtcaggatcagaaatagggtcagctcatcatgcttgggctttgttgggtcttggtagttaggataagggttcaagggctttntttttccatgaggggagagatttgggacacttcgcagggtttacg

SEQ ID NO: 822 - DNA, 506 bp, Homo sapiens
  modified_base (439)..(439): a, c, t or g
  modified_base (446)..(446): a, c, t or g
  modified_base (506)..(506): a, c, t or g
gcactgtttcaaactgtaagtctaaataaaaagttaaaacacagaaaaacaagataaaaaccgggctgggttgcagatggcaactttccctgtgtctcggtttcctcgtctgtaaaatggacgtcctgttgctctgcgcctgccagaagattctggaggggctgaaatgagcaggtcatctgtgcaagaagccccctccggtggagcacaggccaggcccgcctcgctgtcatggttggtgaccgacgggatgccccaagcaagaacaggtccaggcgatgctgaggcctgtggtttttttttttgtttttgagacgcagttcaactcttgcccagggtggagtgcagtggcacaatctcggcccactgcaacctccgcttcccaggttcaagggattctcctgccttagcctcccgagtagctgggatttgcaggtgntcgccancacggcccagttaatttttgtatttttagtagaaacggggttttgccatttggtagggtn

SEQ ID NO: 823 - DNA, 674 bp, Homo sapiens
ccccttggttccgcccgcgcgtcacgtgaccccagcgcctacttgggctgaggagccgccgcgtcccctcgccgagtcccctcgccagattccctccgtcgccgccaagatgatgtgcggggcgccctccgccacgcagccggccaccgccgagacccagcacatcgccgaccaggtgaggtcccagcttgaagagaaagaaaacaagaagttccctgtgtttaaggccgtgtcattcaagagccaggtggtcgcggggacaaactacttcatcaaggtgcacgtcggcgacgaggacttcgtacacctgcgagtgttccaatctctccctcatgaaaacaagcccttgaccttatctaactaccagaccaacaaagccaagcatgatgagctgacctatttctgatcctgactttggacaaggcccttcagccagaagactgacaaagtcatcctccgtctaccagagcgtgcacttgtgatcctaaaataagcttcatctccgggctgtgccccttggggtggaaggggcaggattctgcagctgcttttgcatttctcttcctaaatttcattgtgttgatttctttccttcccaataggtgatcttaattactttcagaatattttcaaaatagatatatttttaaaatccttaaaaaaaaaaaaaaaaa

SEQ ID NO: 824 - DNA, 364 bp, Homo sapiens
  modified_base (337)..(337): a, c, t or g
  modified_base (353)..(353): a, c, t or g
  modified_base (360)..(360): a, c, t or g
ttttttttttttagatgccataacttcatttaatattgatagcagctcaatttaaattttgaaaaagcaaatacatttaataaaattggtgtgaattattacatattttgatggaactactgtacagaatgtatacatatataaatctatagatagaattatatacatttgagtatataccacatacatattttttccactcacatttttctctttagtaaaacaaagcagttttactgtacacagaagtgcaatgctacattaagtcctgagtaatttaaggtatcattaataaactgctataaattctagttttccagccaaagctccaataggnttctggtaacaaaaantgtggantaat

SEQ ID NO: 825 - DNA, 5274 bp, Homo sapiens
gcaggtggggccgccgcggaactccaggtccggccgggagcagaggggcgggggcgagagggaagtgggcgggagccgcgatctgagtagccagcgtcgccggcgaccgcggagttctgggctagtgggaccccgcgcgggctggttcgggatgagcgatggcatcggtcaaggtggccgtgagggtccggcccatgaatcgcagggaaaaggacttggaggccaagttcattattcagatggagaaaagcaaaacgacaatcacaaacttaaagataccagaaggaggcactggggactcaggaagagaacggaccaagaccttcacctatgacttttctttttattctgctgatacaaaaagcccagattacgtttcacaagaaatggttttcaaaaccctcggcacagatgtcgtgaagtctgcatttgaaggttataatgcttgtgtctttgcatatgggcaaactggatctggaaagtcatacactatgatgggaaattctggagattctggcttaatacctcggatctgtgaaggactcttcagtcggataaatgaaaccaccagatgggatgaagcttcttttcgaactgaagtcagctacttagaaatttataacgaacgtgtgagagatctacttcggcggaagtcatctaaaaccttcaatttgagagtccgtgagcatcccaaagaaggcccttatgttgaggatttatccaaacatttagtacagaattatggtgacgtagaagaacttatggatgcgggcaatatcaaccggaccaccgcagcgactgggatgaacgacgtcagtagcaggtctcatgccatcttcaccatcaagttcactcaggctaaatttgattctgaaatgccatgtgaaaccgtcagtaagatccacttggttgatcttgccggaagtgagcgtgcagatgccaccggagccaccggggttaggctaaaggaagggggaaatattaacaagtccctcgtgactctggggaacgtcatttctgccttagctgatttatctcaggatgctgcaaatactcttgcaaagaagaagcaagttttcgtgccttacagggattctgtgttgacttggttgttaaaagatagccttggaggaaactctaaaactatcatgattgccaccatttcacctgctgatgtcaattatggagaaaccctaagtactcttcgctatgcaaatagagccaaaaacatcatcaacaagcctaccattaatgaggatgccaacgtcaaacttatccgtgagctgcgagctgaaatagccagactgaaaacgctgcttgctcaagggaatcagattgccctcttagactcccccacagctttaagtatggaggaaaaacttcagcagaatgaagcaagagttcaagaattgaccaaggaatggacaaataagtggaatgaaacccaaaatattttgaaagaacaaactctagccctcaggaaagaagggattggagttgttttggattctgaactgcctcatttgattggcatcgatgatgaccttttgagtactggaatcatcttatatcatttaaaggaaggtcagacatacgttggtagagacgatgcttccacggagcaagatattgttcttcatggccttgacttggagagtgagcattgcatctttgaaaatatcggggggacagtgactctgatacccctgagtgggtcccagtgctctgtgaatggtgttcagatcgtggaggccacacatctaaatcaaggtgctgtgattctcttgggaagaaccaatatgtttcgctttaaccatccaaaggaagccgccaagctcagggagaagaggaagagtggccttctgtcctccttcagcttgtccatgaccgacctctcgaagtcccgtgagaacctgtctgcagtcatgttgtataaccccggacttgaatttgagaggcaacagcgtgaagaacttgaaaaattagaaagtaaaaggaaactcatagaagaaatggaggaaaagcagaaatcagacaaggctgaactggagcggatgcagcaggaggtggagacccagcgcaaggagacagaaatcgtgcagctccagattcgcaagcaggaggagagcctcaaacgccgcagcttccacatcgagaacaagctaaaggatttacttgcggagaaggaaaaatttgaagaggagaggctgagggaacagcaggaaatcgagctgcagaagaagagacaagaagaagagacctttctccgcgtccaagaagaactccaacgactcaaagaactcaacaacaacgagaaggctgagaagtttcagatatttcaagaactggaccagctccaaaaggaaaaagatgaacagtatgccaagcttgaactggaaaaaaagagactagaggagcaggagaaggagcaggtcatgctcgtggcccatctggaagagcagctccgagagaagcaggagatgatccagctcctgcggcgtggggaggtacagtgggtggaagaggagaagagggacctggaaggcattcgggaatccctcctgcgggtgaaggaggctcgtgccggaggggatgaagatggcgaggagttagaaaaggctcaactgcgtttcttcgaattcaagagaaggcagcttgtcaagctagtgaacttggagaaggacctggttcagcagaaagacatcctgaaaaaagaagtccaagaagaacaggagatcctagagtgtttaaaatgtgaacatgacaaagaatctagattgttggaaaaacatgatgagagtgtcacagatgtcacggaagtgcctcaagatttcgagaaaataaagccagtggagtacaggctgcaatataaagaacgccagctacagtacctcctgcagaatcacttgccaactctgttggaagaaaagcagagagcatttgaaattcttgacagaggccctctcagcttagacaacactctttatcaagtagaaaaggaaatggaagaaaaagaagaacagcttgcacagtaccaggccaatgcaaaccagctgcaaaagctccaagccacctttgaattcactgccaacattgcacgtcaggaggaaaaagtgaggaaaaaggaaaaggagattttggagtccagagagaagcagcagagagaggcgctggagcgggccctggccaggctggagaggagacattctgcgctgcagaggcactccaccctgggcatggagattgaagagcagaggcagaaacttgccagtctgaacagtggcagcagagagcagtcagggctccaggctagcctggaggctgagcaggaagccctggagaaggaccaggagaggttagaatatgaaatccagcagctgaaacagaagatttatgaggtcgatggtgttcaaaaagatcatcatgggaccctggaagggaaggtggcttcttccagcttgccagtcagtgctgaaaaatcacacctggttcccctcatggatgccaggatcaatgcttacattgaagaagaagtccaaagacgccttcaggatttgcatcgtgtgattagtgaaggctgcagtacatctgcagacacgatgaaggataatgagaaacttcacaatggcaccattcaacgtaaactaaaatatgagcggatggtttctcgctctttgggcgcaaatccagatgacctgaaggacccaattaaaattagtatcccacgctacgtcctctgcgggcaaggaaaggatgcacacttcgagtttgaggtcaagattactgtcctagatgagacatggactgtattcaggcgttacagtcgttttcgagaaatgcataaaacattgaagttaaagtatgcagagcttgctgcccttgaatttcctccaaagaaactatttggaaataaggatgaacgtgtgattgctgagagacgaagtcacttagagaaatacctcagggactttttcagcgtgatgctccagtccgcaacatctcccctccacatcaacaaagtgggactgactctctcgaaacataccatttgtgagttttcaccattcttcaagaaaggagtctttgactacagcagccacgggacggggtagagccaggggtgatggaggaaccaccacagcagtgccttctcgtcgaagcgggctccgatgcagggcagctcccccatgcgaggatccgggtctgcctcctcctgctgaagacagacatgcagcagcgggcccgggccacctcacgtttccatacctagtgcctgagtttggggatgggatgctctgcctgctgatgtggccctgacaggcagccgttaccgttccattgcggttgaacgtggccttttcccacagtgcttccttctcactgcgcagcaaagttcgtcccctgtggcaagatagatgtggttgggccatcgtgggttccctgagcccagccagcctgggacctcccaaagtgggtggcttaccagaccacccttaaatgactttcatctggtttcctctttcaccaaaatatactcgtattttttatatttcttccatgtggctggctatattccaagaaaagcattttaaattatttcattgtatttttttctttttttccctcatttgaatcagaacttttatataaaacccaaacactgatgtttacacagaatttcatattctgcaaaagggattttttgatccaatcatgactgtagtcttccatgcttgacaaattggatgtagacaacattacttaaaacttctataaatccctacaattaggatatttatttaaccttgaatattcaagaacattctcccaaatctaaatggctactgtgcattcttgagctttttctgctaagcacaaaatgaacgcaaagctaaatgcatatttttaagtattattcacattttttgttacagaatctattggatctttggctggaaaactagaatttatagcagtttattaatgataccttaaattactcaggacttaatgtagcattgcacttctgtgtacagtaaaactgctttgttttactaaagagaaaaatgtgagtggaaaaaatatgtatgtggtatatactcaaatgtatataattctatctatagatttatatatgtatacattctgtacagtagttccatcaaaatatgtaataattcacaccaattttattaaatgtatttgctttttcaaaatttaaattgagctgctatcaatattaaatgaagttatggcatctaaaaaaaaaaaaaa

SEQ ID NO: 826 - DNA, 390 bp, Homo sapiens
  modified_base (18)..(18): a, c, t or g
  modified_base (41)..(41): a, c, t or g
  modified_base (67)..(67): a, c, t or g
  modified_base (105)..(105): a, c, t or g
  modified_base (114)..(114): a, c, t or g
  modified_base (142)..(142): a, c, t or g
  modified_base (152)..(152): a, c, t or g
  modified_base (198)..(198): a, c, t or g
  modified_base (243)..(243): a, c, t or g
  modified_base (321)..(321): a, c, t or g
  modified_base (339)..(339): a, c, t or g
  modified_base (351)..(351): a, c, t or g
  modified_base (364)..(364): a, c, t or g
  modified_base (373)..(373): a, c, t or g
  modified_base (382)..(382): a, c, t or g
ttttttttttttttaaantccataaattttaatgaaatttnctattacctgttcttctgcaggcggnctgctgtgctttgtactgggaacccccaggggacaagnagtgcaggnctggaatgagacctctgtctgaccaggncctttgtggnaggacctgggcaggtagaaaggaccaaaggctttgatgacttgggnaccgatgacccggccactcagacttccagacaccagggatctggncaagggggtggggcaagggccagacagaccaacagccttggggtcctggcgagacttcgccaagaccagatctgaagntggctgggccaaaagcanctaaggcggcanggcaagacaggtncgctttggnagaagccanagcctact

SEQ ID NO: 827 - DNA, 1505 bp, Homo sapiens
gctagggccctggttcccactgcctagtttctgggcccccggcatccgagtcggccaaaagccgggcagaagagagcgccaaggactggcagttccggaacgggcaatcccagccgaggggaccagcggcagagcacgggtccgagccggggacggcggcgtcggtgggtcatgctccggcactccccctcgctgtgggagctggtggaggagcacgttccgctccgggagcgacgcgaagtgaagaggattctgggggaggcggcggtggacctgagcctggagctgcgggcggaggtggcgatgttacgggcactgctccaagaggctcgatcctctcaagcccccagctcccgccccatctctgacccctcttctcttctggcaccaccgcctctcctaaaggacctcttgcgccaggagctccggcagttgctccagggtctccgccacaaagccatctgtgagggcagggaccaggcccaagcttgggtccagtatagccccagggtcctgcactttgccttggaggagcccaggtgtgatttgccagaacaggagatattccagatgagaggtggtgggcccagcagcggtcacagagatctcagcatcatcaaggaccaactgaacgtgtccaacattgaccaggtggccagacacctgaggggccttctggaggaggagtgtcacaccttggagagggagatcctcatcctgcagcgctgcctggaagaggagtatttgaggccttgccacccctctgaggcagccctggagcccaccctggcagagctaaaggaacagaagaaggccatggagcaggagctgcaggcatctgtggggccttcttgtgtctctcccaaccacaggcagcggcccttggggtcctccacacagggcctcagacccccgcttcccctctgcggggttgcacctctccagtgctgcctgcctgcacctcctctggagccctaccttcgacctcgaggccagtcggctacccaccgctggggacggcagcttcagtgcagccccagggaagggccagcttccacacccatgtccagtgcagcaccccaagccccagcctgaagggctggtcaccgagtaggctctggcttctgccacagcgcacctgtctgccgctgccgcctcagctgctttggcccagccagcttcagatctggtcttggcgagctctcgccaggaccccaaggctgttggtctgtctggcccttgccccacccccttgccagatccctggtgtctggagctgagtggccgggcatcggtcccaagcatcaaagcctttggcctttctcctcccaggcctccacaaaggcctggcagacagaggtctcattccagcctgactcttgtcccctgggggacccagacaaagcacagcagccgctcagagacaggaatagaaatttcattaaaatctatggactttaaaaaaaaaaaaaaaaaaaaaaaaaaaaaaaaaaaaaaaaaaaaaa

SEQ ID NO: 828 - DNA, 436 bp, Homo sapiens
  modified_base (295)..(295): a, c, t or g
  modified_base (379)..(379): a, c, t or g
  modified_base (385)..(385): a, c, t or g
  modified_base (415)..(415): a, c, t or g
  modified_base (421)..(421): a, c, t or g
ttttttttttcacagttaaacattcctttattcaccctatggctcccaagaaaagcattcttcctctggagtactggtgtactaaggggacaatacaccaaatttgttgagtttacaatcaagtctactaaggttggacttccttatcagtttggcgagtcccagggcagaataatcatccatctacaggtctctgtttcctctccctccacagcagtggagaggcatcccagtgtttggggcactgtgttcctcttcgtccctgcaccaggaccctgggaaggccttggccagnagacctcaccaaactcggacttgcggtgctgggccagctttcatgggatgctgggagtgggagcacgaatggaacgtaggcagnagctgnctggcagggagcttacaaaaggcctggggnccagtntcttaccagggggtg

SEQ ID NO: 829 - DNA, 347 bp, Homo sapiens
  modified_base (307)..(307): a, c, t or g
  modified_base (320)..(320): a, c, t or g
  modified_base (342)..(342): a, c, t or g
gacgagccgggccggaagaagaggtagggcgccgcgtgacagattagtcctaaagggaacggggttgttagttcaattggctaccggaaaaaaccaggctgggctgggcgccgcatgacaaccgataccggaaaaggcgggtcgttccccccggacagccctacgccggcaaaggtctcgagatgcaggcggccctagaggtcaccgctcgctactgtggccgggagctggagcagtatggccagtgtgtggcggccaagccgaaatcctgggcagcgggactgtcactaccttaagatgagcattncccagtgcacatncttcccacccaattcattccgncagat

SEQ ID NO: 830 - DNA, 698 bp, Homo sapiens
gccatgacgagccggtccggaagaagaggtagggcgccgccgtgacagattagtcctaaagggaacggggttgttagttcaattggctaccggaaaaaaccaggctgggctgggcgccgccatgacaaccgataccggaaaaggcgggtcgttccccccggacagccctacgccggcaaaggtctcgagatgcaggcggccctagaggtcaccgctcgctactgtggccgggagctggagcagtatggccagtgtgtggcggccaagccggaatcctggcagcgggactgtcactaccttaagatgagcattgcccagtgcacatcctcccacccaatcatccgccagatccgccaggcctgtgctcagccttttgaggccttcgaggagtgtcttcgacagaacgaggcagctgtgggcaactgtgcagagcatatgcgccgcttcctgcagtgcgctgagcaggtgcagccgccacgctcacctgcaactgtggaggcacagccacttcctgcctcctgaggactcctctgacggcaggaaaactggacatgaatgactgcccccccgcccctcccctgcagagtggccagatggagtcctgagccctggacatgggcccggctttcctggatatcaggacttccaataaataaagactctgtatactgggaaaaaaaaaaaaaaaaaaaaaaaaa

SEQ ID NO: 831 - DNA, 459 bp, Homo sapiens
  modified_base (396)..(396): a, c, t or g
  modified_base (433)..(433): a, c, t or g
  modified_base (451)..(451): a, c, t or g
ttttttttttttggttaaaacacctttaatgatagagggaaagacactaatatctcccgtctgttcttgacattttactaggttaggaagctctggagcctacagcttgaggagaagccatcgttcaagtcagtcaatagcaaaaccctcactctctcctcctcagaactcctgttccaaatgatcctatgttaagagtaaatactacaactcattacaagacggagagggcagggagggacgccacctgggagctggtctcccaaagtctggggactcttaaggaaccaggacaatgacaaagacacaagccccagccttacgggatagggcaaaatggggtagggggtttttttaaagagggaagataaggggaaatacaagggggccaggggnttaaagggggggggtttttcttaaaacttgggaggcntacttgttgcttgggggnttccccct

SEQ ID NO: 832 - DNA, 359 bp, Homo sapiens
  modified_base (138)..(138): a, c, t or g
  modified_base (347)..(347): a, c, t or g
  modified_base (352)..(352): a, c, t or g
accaccaccaccacctgacagcctggatcagcctcagccaatggagcagggaagcagtggtgttttaggaggcaaggaagaggggggcaaaccggagagaagctcaagtccggcatcagcactcaccccagaaggganagccaccagcgtgaccttggtagaggagctgagcctgcaggaggcaatgagaaaggagccaggagagagcagcagcagaaaggcctgcgaagtgtgtggccagggctttccctcccaggcagctctgggaggagcattcagaagacccaccccaaggaggggccgctctttcacttgtgttttctgcaggcagggttttttgagcgggntaccntcaagaa

SEQ ID NO: 833 - DNA, 4931 bp, Homo sapiens
gagctgcagaagcgtagggaagaagctgaagaaaaaaagggggcgtctcccctttaaagacttgcaaagattgagagagaaagagagagagtcaagaacagagaatcagagagagagagagagtctgtgtctctgggaaagaagaacatctctgcttcacagtgatttgcgctgggggagaggcatcaattggcttcggacccaagggggagacgagaccaggtcaccccggttaagaccaagtgagcgttgcccctccctctcccaactctctacccgggaatgtctcggcgaaagcagcggaaaccccaacagttaatctcggactgcgaaggtcccagcgcgtctgagaacggtgatgctagcgaggaggatcacccccaagtctgtgccaagtgctgcgcacaattcactgacccaactgaattcctcgcccaccagaacgcatgttctactgaccctcctgtaatggtgataattgggggccaggagaaccccaacaactcttcggcctcctctgaaccccggcctgagggtcacaataatcctcaggtcatggacacagagcatagcaaccccccagattctgggtcctccgtgcccacggatcccacctggggcccagagaggagaggagaggagtctccagggcatttcctggtcgctgccacaggtacagcggctgggggaggcgggggcctgatcttggccagtcccaagctgggagcaaccccattacctccagaatcgacccctgcaccccctcctcctccaccaccccctccgcccccaggggtaggcagtggccacttgaatatccccctgatcttggaagagctacgggtgctgcagcagcggcagatccatcagatgcagatgactgagcaaatctgcaggcaggtgctgttgcttggctccttaggccagacggtgggtgcccctgccagtccctcagagctacctgggacagggactgcctcttccaccaagcccctactacccctcttcagccccatcaagcctgtccaaaccagcaagacactggcatcttcctcctcctcctcctcttcctcttcaggggcagaaacgcccaagcaggccttcttccacctttaccacccactggggtcacagcatcctttctctgctggaggggttgggcgaagccacaaacccacccctgccccttccccagccttgccaggcagcacagatcagctgattgcctcgcctcatctggcattcccaagcaccacgggactactggcagcacagtgtcttggggcagcccgaggccttgaggccactgcctccccagggctcctgaagccaaagaatggaagtggtgagctgagctacggagaagtgatgggtcccttggagaagcctggtggaaggcacaaatgccgcttctgtgccaaagtatttggcagtgacagtgccctgcagatccaccttcgttcccacacgggtgagaggccctataagtgcaatgtctgtggaaaccgttttaccacccgtggcaacctcaaagtgcatttccaccggcatcgtgagaagtacccacatgtgcagatgaacccacacccagtaccagagcacctagactatgtcattaccagcagtggcttgccttatggtatgtccgtgccaccagagaaggccgaggaggaggcagccactccaggtggaggggttgagcgcaagcctctggtggcctccacaacagcactcagtgccacagagagcctgactctgctctccaccagtgcaggcacagccacggctccaggactccctgctttcaataagtttgtgctcatgaaagcagtggaacccaagaataaagctgatgaaaacacccccccagggagtgagggctcagccatcagtggagtggcagaaagtagcacggcaactcgcatgcaactaagtaagttggtgacttcactaccaagctgggcactgcttaccaaccacttcaagtccactggcagcttccccttcccctatgtgctagagcccttgggggcctcaccctctgagacatcaaagctgcagcaactggtagaaaagattgaccggcaaggagctgtggcggtgacctcagctgcctcaggagcccccaccacctctgcccctgcaccttcatcctcagcctcttctggacctaaccagtgtgtcatctgtctccgagtgcttagctgtcctcgggccctacgccttcattatggccaacatggaggtgagaggcccttcaaatgcaaagtgtgtggcagagccttctccaccaggggtaatctgcgtgcacatttcgtgggccacaaggccagtccagctgcccgggcacagaattcctgccccatctgccagaagaagttcaccaatgctgtcactctgcagcagcatgtccggatgcacctggggggccagatccccaacggtggtactgcactccctgaaggtggaggagctgctcaggagaatggctccgagcaatctacagtctccggggcagggagtttcccccagcagcagtcccagcagccatcaccggaagaggagttgtctgaggaggaggaagaggaggatgaggaagaagaggaagatgtgactgatgaagattccctggcagggagaggctcagagagtggaggtgagaaggcaatatcagtgagaggtgattcagaagaggcatctggggcagaggaggaggtggggacagtggcggcagcagccacagctgggaaggagatggacagtaatgagaaaactactcaacagtcttctttgccaccaccaccaccacctgacagcctggatcagcctcagccaatggagcagggaagcagtggtgttttaggaggcaaggaagaggggggcaaaccggagagaagctcaagtccggcatcagcactcaccccagaaggggaagccaccagcgtgaccttggtagaggagctgagcctgcaggaggcaatgagaaaggagccaggagagagcagcagcagaaaggcctgcgaagtgtgtggccaggcctttccctcccaggcagctctggaggagcatcagaagacccaccccaaggaggggccgctcttcacttgtgttttctgcaggcagggctttcttgagcgggctaccctcaagaagcatatgctcctggcacaccaccaggtacagccctttgccccccatggccctcagaatattgctgctctttctctagtccctggctgttcgccttccatcacctccacagggctctccccctttccccgaaaagatgaccccacgatcccatgagcctgtttttctgtacctgctgctctttgtcccacagagcagaaacagcttcacaaaaggacctcccagagttatgagccctgattttgtctttttctctaagttcttaacatgttatgtccctagtggcttttctgtagtccctgagcttggaaattactgtgcttacaaggggatggccccctaaggaatttttcttccctcctcattctttgtacctgaggaacatagattctctgcagctttctcaaggggaaccctctccagcttccctggtgtgacccttcttccccctcctctctcctctccctttccctttggtaggtgcacctgagcacctacatttggcattgcagcctagccaaaaagggctggcagctgtctctggagggcccagtgccactcctctggggtgacctttctgctcagctggtgggtatgggtcccctatctttctagaaccagtatgtggcattcctgtcaaatggcctgcccatgaagccctggaattccagctccacctccactaccactccaagcctggccccaccagtgctgtttggcctaggaactgtggctgggaaggtgcctccaacaatgggatccagggaagccaaggagaagacagcccccctcctatttcagcctcctgcacccaaggcagtgcctgagaagcccatcatagacaagaagtagcaaactgtacattccttcttcctccccctgctccagaaggtgccggtactgaagatgctccagtaattggtgacccaaccctaggaagtagggagaaatgaaggaagggcataggaaaattttcccagtaaatcccctgatggtcacattaaggtaaaggttttggctggtcagtgtgccaagacctctccagcttctcattcatgatgacctctcaaagttgggaaacaagctgatttcttgccaagaggtctcccaggagatatttgggaaatgtgaagttcgtatctttaaggagcatttttggtcagcatggttgatgaactaatgatgagagagttaaggaatgttgctagaacatagggcttgctggtacctatgtgactaagaaagggacatgatgtaagggaaaaggcctcaaattcttgtgaatgtggacattctcgttaatattcttttgggctaatagtgacatagtgtgcagaggtgtaccagggatcatgggggatttcctagcactagtatgcttctagttttagataactccctcctttattccctggccccttgtattttccttatcttcctctttcaagacccctacccattttgcctatccgtaggctggggcttgtgtctttgtcattgtctggttcttaagagtcccagctccaggtggcgtcctccctgcctctccgtcttgtaatgagttgtagtatttactcttaacataggatcatttggaacaggagttctgaggaggagagagtgagggttttgctattgactgacttgaacgatggcttctcctcaagctgtaggctccagagcttcctaacctagtaaaatgtcaagaacagacgggagatattagtgtctttccctctatcattaaaggtgttttaaccaaaaaaaaaaaaaaaaaaaaa

SEQ ID NO: 834 - DNA, 490 bp, Homo sapiens
  modified_base (374)..(374): a, c, t or g
  modified_base (398)..(398): a, c, t or g
  modified_base (435)..(435): a, c, t or g
  modified_base (455)..(455): a, c, t or g
  modified_base (463)..(463): a, c, t or g
tttttttttttttgacagcagagcataagtccttttaattatgtgtttgaaaaatgtcacaagtcaaaaaaggaacacaaggcaggctccggctccctccacccccgtgagagcccttgtccatttcagccttgcactcagaaagaccccgggggtcttgtagttccacgtgcttcatgtttcgtggtatctgtcagagccttaaaacaggcccacccactactgtgaaatttcaaggaaataactgattcagttaaataacagtcccaaggtagacctgggtctcacaggtgaccacccgttttaaatccagaggccttcttttctgtccaaagccactgaaatttgatctcctccttcacacattcccgggnccccaatatggccacccacctttntggacaggtgggctaacagggttttacattaatgggnaggtttggttaaaaaacatnttccaccnaacctttttgccaaagaggttagttgg

SEQ ID NO: 835 - DNA, 368 bp, Homo sapiens
  modified_base (202)..(202): a, c, t or g
  modified_base (213)..(213): a, c, t or g
  modified_base (328)..(328): a, c, t or g
tctgcaaaagtacaagagcctctgcatgttcgaaatccccaaggagtagagtgaggctgacttccttagaaagagggggaagccaatggcctgtctccccactaccatccccaaacgctccttggggcgtggttcctgtggaccccagctcagcacgtcaagctgcaggggcggggctcctgtgctgctgcgcgcgcttcgnctgtgcgggancagcgcagagcttggctgcgcgggggttcctcgtgtagatccatatgtctagatgcataataactggagtgcctgctcgtggaagtcagaatgctcctgggaggctgcagagggngtggaggactcttccctgcctcttggggaaggggccatct

SEQ ID NO: 836 - DNA, 2222 bp, Homo sapiens
gtagagtgcgcgacgcttttggcgacccgacctctggctaacctacccccggagccatggcctctgctggggtggcagccgggcgacaggcggaggatgtattgccgccaacgtccgaccagccgctgcctgacaccaagccgctgccgcctcctcagccgccgccggtccctgcgcctcaaccgcagcagtcgccggcgccacggcctcagtcacctgcccgcgcgagggaggaagagaactactcctttttacctttggttcacaacatcatcaaatgcatggacaaggacagcccggaggtccaccaggacctgaacgccctcaaaagcaagttccaggagatgcgcaagctcatcagcaccatgcccggcatccacctgagccccgaacagcagcagcagcagctgcagagcctccgggagcaagtcaggaccaagaatgagcttctgcaaaagtacaagagcctctgcatgttcgaaatccccaaggagtagagtgaggctgacttccttagaaagagggggaagccaatggcctgtctccccactaccatccccaaacgctccttggggcgtggttcctgtggaccccagctcagctcgtcaagctgcaggggcggggctcctgtgctgctgcgcgcgcttcgcctgtgcgggagccagcgcagagcttggctgcgccgggggttcctcgtgtagatccatatgtctagatgcataataactggagtgcctgctggtggaagtcagaatgctcctggaggctgcagagggggtggaggactctcccctgcctctggggagggggccatctgctgcgcccggccccactgacagatctgaagagcacagtaggaagggaggcggctcctctttgcttccttccctctctctcctcccacccccataggatcagtgtgtaccaggtacacattgttcctgttaacagcagcttcttgaaacatttgcatagaattcactggacgaattaagcctgcactcatatggcatagaattgtgagagaatgttttgaaaggccagagggtggcctttttccccaaacagtttggttccttttatgtttgagccagtgaagggaactacgctttgggggcttcagcctagagccctgccaggcagcccctggctccaggttccctgcctcctagcgctctcctcgccttcagctcttgctcccttcctcgttcatcaccctcagtcagtgcccaagagtggccaaaccgcttcacatctgcagtgcttccccagggttgacaaggggccgtcctttccacacaggccagaagaggtcttcaggcgaaccgaccttcccccttctggcatttcagattccccttgctctggttaaaaggtctttccctcgtggcctttgcacttgcggcagcaacgtgtactacactgcagaagggttcagtatgcaccttgtgttgagagagaggcaaccctgggggccagttcaggtggtccccaaccataagctaggtctgaaagttacacagccaagtttgagctcttaaaagttgatgaacagcctcatttccccagcttccctgatttcttccagatgggacgttttatttgtgtgctctcccttgactgtcagattgaagtaagagcagttctctccgttgcctctcgaggaggaggtgcgaagtcctggagtattgtttgggtctcggaatgggcgcataacctgcgctgaccagtttaggggcttagcagatgcctgccagctgacctcgttggcaggagggttgggtggagatgtttttagcagagcttccattagtgtagacctgtagccacctgtcagaaggtgggtggcatattggggacctgggaatgtgtgaaggaggagatcaaatttcagtggctttggacagaaaagaaggctctggatttaagcgggtggtcacctgtgagaccaggtctaccttgggactgttatttaactgaatcagttatttccttgaaatttcacagtagtgggtgggcctgttttaaggctctgacagataccacgaaacatgaagcacgtggaactacaagacccccggggtctttctgagtgcaaggctgaaatggacaagggctcctcacgggggtggagggagccggagcctgccttgtgttccttttttgacttgtgacatttttcaaacacataattaaaaggacttatgctctgctgtctcagg

SEQ ID NO: 837 - DNA, 536 bp, Homo sapiens
  modified_base (26)..(26): a, c, t or g
  modified_base (454)..(454): a, c, t or g
  modified_base (471)..(471): a, c, t or g
  modified_base (483)..(483): a, c, t or g
  modified_base (497)..(497): a, c, t or g
  modified_base (519)..(519): a, c, t or g
  modified_base (530)..(530): a, c, t or g
tttttttttttttttttgagtacttnttgcagaagtttaggaggtaataaagatatctgactttctaacatgatagaatttttaccaatgcagtcaaggcatgacctgagtagtgaataaggctgtgtttgaaagatcaataaatcattacagtgacctgtatccaaggcaagtaagtcatctttgctcccaccaaataccattatttcattttcttttcccaaacaggctgtgtgccataacctaggtcttgttttaggtaaatgtgtaagttgtttccaacaatttgttgtgacattatgaatccaaccatcacttaatggggatattatctgcacttagtccaccacatagggaaaagtttatcatcaggctatagggtgttaaagtatgccatgaccgatgttttggggctttctccattaatagtaatccttccagaccaagtccgggngtccagggttaggtagnggcaatctttcncccagtttgcagancacgtccgccaaggtataaccntatttccaggnctgcaa

SEQ ID NO: 838 - DNA, 468 bp, Homo sapiens
  modified_base (405)..(405): a, c, t or g
agaagctgtgtaactgtttgctgtgtaactgataaacataattttatgtattctgtatttttagtctattgaagacaatgaagtatatttgcctaatgatgaaatttggacctatgatattgatagtgggttgtggtaagtaattttaaattgcatactgtctgatcttaatatctattataaatgtttctgtagactctagggaatttgagaccatactttgaacatactgcaacatttttgaagtctccctttcctttcctttcaatgcttttattttctgactctttcattcccctactgtcttccctgctccactttttgtcttttagtatttctctcaagaccagtgctgtctctgaaggattttgttttattctgcaaatttcccagttctagtgacgngtggaaatttttgtggaattttttttttttcccaggcagattggaaaaaggtttacccggggt

SEQ ID NO: 839 - DNA, 2688 bp, Homo sapiens
ggcaagcggcgggccagcgacggcgcgaatggcggactctcagctgttctgtgtggcggaggaacgcagcggccactgcgccgtggtggacggaaacttcctctacgtgtgggggggctacgtgtctattgaagacaatgaagtatatttgcctaatgatgaaatttggacctatgatattgatagtgggttgtggagaatgcacctcatggaaggagaactcccagcctccatgtcaggaagctgtggtgcttgcattaatggaaagctgtacatttttggaggatatgatgacaaaggatacagcaatcgactttattttgttaatttacgaacaagagatgaaacctacatttgggagaaaatcaccgactttgaagggcaaccacctacaccacgtgataaactttcctgctgggtatataaagacagactaatatattttggtggttatgggtgtaggagacacagtgaactccaagactgttttgatgttcatgatgcatcttgggaagagcagatattctggggatggcataatgatgtccacatatttgacacaaagacacagacttggtttcaaccagaaattaaaggtggagttccaccacagccacgagccgcgcatacgtgtgcagttcttggaaataagggttatatctttggcggacgtgttctgcaaactaggatgaatgatttgcactatctaaacctagacacctggacttggtctggaaggattactattaatggagaaagcccaaaacatcggtcatggcatactttaacacctatagctgatgataaacttttcctatgtggtggactaagtgcagataatatcccattaagtgatggttggattcataatgtcacaacaaattgttggaaacaacttacacatttacctaaaacaagacctaggttatggcacacagcctgtttgggaaaagaaaatgaaataatggtatttggtgggagcaaagatgacttacttgccttggatacaggtcactgtaatgatttattgatctttcaaacacagccttattcactactcaggtcatgccttgactgcattggtaaaaattctatcatgttagaaagtcagatatctttattacctcctaaacttctgcaacaagtactcaaaaaaataacattttgggctgcagctaatcaccgagaagaacaaagagtccaaaaagaagaaacagaaaataaatatcagtggatcagtagcaattaaattgttatatactttacatatttagtatgttttaactttttaatcagactatacatttacactcccaaattgcaggctttatttaaaggataaaatttaaaggataaaaaaacagtcactctgttaagtgactatatgccatgggatatatggaaaaaagatattaatgcagattaatttatatttgtaaacaaatttccttacaaactgcagaacaaatattctttctgaaagtaagtacagttataacagattttaaatcaatgtgtattctttactggaaagattacatacatttgagaataagaaattactctcaagaacttcagaaatctgcaacataattttataaatatataaatacatgtatgtatgtcaaaacactacatatacactttcagaaagaataaactttctcaagtcattttaaagttacctaacgttcttcttgaataactaatacagtgggtcaaatattataaaataggcaaacaccaaaatggtattaaatattgaactcctgaccttttcgacacttacctagtaaagtattcttaggcatcatcataacttttcctcacctttattcgaatagaggaataaatgtcttcagttgtctctccattacccctaagttattagtttgtctagtttatatataaagaccatgttttaaagtacataaagtggaggtttatttatcatacaggctttgaaacattaagaagcagtatttttattaactttttgagacatattaaaatacattttgccttagaagactgcttctaaagtaatttttgtaagtaatgagatgggatggtaatctagtaatttgactttatagaaatccctcagtttggcccccaccattctacagagttgtactcaagacagatactgaaaaaatctaataccttcccttgtattttcagcattaccatctatacagaaatggaacactgtatctttatattcctaaaaatggtacttttggcataattaagaaatttttcttcatattatcacaatcatgcccttccattgaattattaattacaattaattactaaaaagcttggtatgtaaaattattctccacaatattaccatgcaagttatctctgaaatttaaaatgttaaagaaaaacatttctatattgaaatatatataatttataatgaaaattatagtagtttgtagtatttcattgaattttagagagatatttcatatatatgtactgtattttggatgtgtaaagcttctatgtattgaaatatttttttacgttttatttattgtacaaagtgtatataattactgttttcttttttgtcagtgtaaagcagtcattagaattgattatacaaaaaaaaaaaaaaaaaaaaaaaaaaaaccaaaaaaaaaaaaaaaaaaaaaaaaaaaaaaaaaaaaa

SEQ ID NO: 840 - DNA, 466 bp, Homo sapiens
  modified_base (448)..(448): a, c, t or g
  modified_base (462)..(462): a, c, t or g
tttttttttttttttaactgtacaaaataatttaatgtttacaaaaatattagaatgtttagttgactgacacagtcttaagtaatctcttctagagaagtatatagtaagaccactgattcccatttcatttcttttttaataagtcaaagaaaggatgctgcaatgcttcatccaaggtaattctttgagttggatcatattctaacattcttcgaaccaggtcaaacagtttctcatgttcttcatcatgacaaagcataaattccttcaacggtttgcagcgtctcctaacatatctaccaggcaggaactgtgttcatcccaatctaggctgggttatgggtgaaaatacttgcgttttcttgttttctggaatcatgtgttgtgggtatggggtcctaatatttcgttcccttcattggccggggggctctttaactatccnggaggtctaaaacntgta

SEQ ID NO: 841 - DNA, 446 bp, Homo sapiens
  modified_base (343)..(343): a, c, t or g
  modified_base (398)..(398): a, c, t or g
  modified_base (437)..(437): a, c, t or g
actacaccccactaattttttgtatttttagtagagggttttgctgtgttgaccaggctggtctcgaactcctgacctcaagtgatctaccctccttggcctcccaaagtgctgggattacaggtgtgagccaccgcacccagcctgaaatttaaattcttgaaagctttaggtgatgcaaccattgaagaactttaaatagggtcatggtatgatcgaggtgttgtgttgttttgtttggggaagaggggctgggagatcccagctagtactgttgaggttgatttgaagttagagcagtgcagggggcatgcagctatgatggggctaagagtcactttanggcagctgtttgcacaatgatggattcccctgttcgttgggggcacctcgccagntttctgtttcctgtctaatcttttagggatccccgtttnaaaagtttg

SEQ ID NO: 842 - DNA, 2524 bp, Homo sapiens
ggcgacggcgctgccgccattttgtggggtgtttgtcgcagcggccgaggagggaagacggcagtttggcgacatttctcggccgaagggccatttgcttttgcggagatgcggcattccaaaagaactcactgtcctgattgggatagcagagaaagctggggacatgaaagctatcgtggaagtcacaagcggaagaggagatctcatagtagcacacaagagaacaggcattgtaaaccacatcaccagtttaaagaatctgattgtcattatttagaagcaaggtccttgaatgagcgagattatcgggaccggagatacgttgacgaatacaggaatgactactgtgaaggatatgttcctagacattatcacagagacattgaaagcgggtatcgaatccactgcagtaaatcttcagtccgcagcaggagaagcagtcctaaaaggaagcgcaatagacactgttcaagtcatcagtcacgttcgaagagccaccgaaggaaaagatccaggagtatagaggatgatgaggagggtcacctgatctgtcaaagtggagacgttctaagagcaagatatgaaatcgtggacactttgggtgaaggagcctttggcaaagttgtagagtgcattgatcatggcatggatggcatgcatgtagcagtgaaaatcgtaaaaaatgtaggccgttaccgtgaagcagctcgttcagaaatccaagtattagagcacttaaatagtactgatcccaatagtgtcttccgatgtgtccagatgctagaatggtttgatcatcatggtcatgtttgtattgtgtttgaactactgggacttagtacttacgatttcattaaagaaaacagctttctgccatttcaaattgaccacatcaggcagatggcgtatcagatctgccagtcaataaattttttacatcataataaattaacccatacagatctgaagcctgaaaatattttgtttgtgaagtctgactatgtagtcaaatataattctaaaatgaaacgtgatgaacgcacactgaaaaacacagatatcaaagttgttgactttggaagtgcaacgtatgatgatgaacatcacagtactttggtgtctacccggcactacagagctcccgaggtcattttggctttaggttggtctcagccttgtgatgtttggagcataggttgcattcttattgaatattaccttggtttcacagtctttcagactcatgatagtaaagagcacctggcaatgatggaacgaatattaggacccataccacaacacatgattcagaaaacaagaaaacgcaagtattttcaccataaccagctagattgggatgaacacagttctgctggtagatatgttaggagacgctgcaaaccgttgaaggaatttatgctttgtcatgatgaagaacatgagaaactgtttgacctggttcgaagaatgttagaatatgatccaactcaaagaattaccttggatgaagcattgcagcatcctttctttgacttattaaaaaagaaatgaaatgggaatcagtggtcttactatatacttctctagaagagattacttaagactgtgtcagtcaactaaacattctaatatttttgtaaacattaaattattttgtacagttaagtgtaaatattgtatgttttgtatcaatagcataattaacttgttaagcaagtatggtcttgataatgcattagaaaaattaaaattaatttttctttttgaaattaccatttttaaatacctttgaaatatcctttgtgtccagtgataaatgtgattgatcttgccttttgtacatggaggtcacctctgaagtgattttttttgagtaaaaggaaatcttgactactttatattcttaaaggaatattctttatatacttcaaatttagaacttaactttaaaagtttttcttctgtaattgttgaacgggtgattattattaactctagataagcaggtactagaaaccaaaactcagaaaatgtttactgttagaattctattaaattttaagtgttgtattctttttcattgggtgatgtcagggtgataaccagacattcatggaaaggcatgcagtttgtccattgtgacagtttgtttaataaaaccacatacacactttatttaagattaaaatctaactggaaagtcagcttggaaaatggacatttccaagtatgtttggtgagtcacagatataaaaatagaaattctgatgagaggtttcagtttttaataccaagtccttaggagtcttaacattggccagcatctgtttatcaaatgacataaatacgtaaacctataagaattaagtttattaattaggcaatttatgtctgtgataattcttacgggagaaagaggatttgattggaaagcagtttgggaagaaagtgctgctgaaatttccagaatttaattgattggttacataaactttttgacttcaaaaaaaaaaaaaaaaaa

SEQ ID NO: 843 - DNA, 407 bp, Homo sapiens
  modified_base (280)..(280): a, c, t or g
  modified_base (378)..(378): a, c, t or g
ttttttttctgtgtcccctcagcatttattttctggatggtcacaacgtattcaatgtgtccttgagacagccacccagcccttagggtggtccctgcgtgtcctggggcgggcgacttcctgagggtgcagtgctggaaacagagactgcttcgagcctggccaccttccctcctgtgccggctgcttctaggagatgctgtgggacggtgcccggcttcgcggtgactaccatgccctaaggagcagagcctccaggatgcccccgggctgcgctggnacgctaaaggaccccagcacctaatcacagtcagcagctttccctccactgacagtgatctgcatgggtccattcctgggcggcctggggggcttcgnttacagttcaacctgggctggttttcccg

SEQ ID NO: 844 - DNA, 499 bp, Homo sapiens
  modified_base (389)..(389): a, c, t or g
  modified_base (398)..(398): a, c, t or g
  modified_base (407)..(407): a, c, t or g
  modified_base (415)..(415): a, c, t or g
  modified_base (422)..(422): a, c, t or g
  modified_base (430)..(430): a, c, t or g
  modified_base (461)..(461): a, c, t or g
  modified_base (480)..(480): a, c, t or g
  modified_base (490)..(490): a, c, t or g
  modified_base (496)..(496): a, c, t or g
cggagagtctggcaaggccatcatcatcacctcccacagcatggaggagtgtgaggccctgtgcacccggctggccatcatggtgcaggggcagttcaagtgcctgggcagcccccagcacctcaagagcaagttcggcagcggctactccctgcgggccaaggtgcagagtgaagggcaacaggaggcgctggaggagttcaaggccttcgtggacctgacctttccaggcagcgtcctggaagatgagcaccaaggcatggtccattaccacctgccgggccgtgacctcagctgggcgaaggttttcggtattctggagaaagccaaggaaaagtacggcgtggacgactacttcgtgagccagatctcgcttggaacaggtcttnctgagcttngcccacctncagcccgnccaacgnagaaggangggcgattgaagggttggccgctttttttgncattcaaggaagggacaangacgggcaancaaggncca

SEQ ID NO: 845 - DNA, 6491 bp, Homo sapiens
ccgccccggcgcccaggctcggtgctggagagtcatgcctgtgagccctgggcacctcctgatgtcctgcgaggtcacggtgttcccaaacctcagggttgccctgccccactccagaggctctcaggccccaccccggagccctctgtgcggagccgcctcctcctggccagttccccagtagtcctgaagggagacctgctgtgtggagcctcttctgggacccagccatgagtgtggagctgagcaactgaacctgaaactcttccactgtgagtcaaggaggcttttccgcacatgaaggacgctgagcgggaaggactcctctctgcctgcagttgtagcgagtggaccagcaccaggggctctctagactgcccctcctccatcgccttccctgcctctccaggacagagcagccacgtctgcacacctcgccctctttacactcagttttcagagcacgtttctcctatttcctgcgggttgcagcgcctacttgaacttactcagaccacctacttctctagcagcactgggcgtccctttcagcaagacgatggctgtgctcaggcagctggcgctcctcctctggaagaactacaccctgcagaagcggaaggtcctggtgacggtcctggaactcttcctgccattgctgtttcctgggatcctcatctggctccgcttgaagattcagtcggaaaatgtgcccaacgccaccatctacccgggccagtccatccaggagctgcctctgttcttcaccttccctccgccaggagacacctgggagcttgcctacatcccttctcacagtgacgctgccaagaccgtcactgagacagtgcgcagggcacttgtgatcaacatgcgagtgcgcggctttccctccgagaaggactttgaggactacattaggtacgacaactgctcgtccagcgtgctggccgccgtggtcttcgagcaccccttcaaccacagcaaggagcccctgccgctggcggtgaaatatcacctacggttcagttacacacggagaaattacatgtggacccaaacaggctcctttttcctgaaagagacagaaggctggcacactacttcccttttcccgcttttcccaaacccaggaccaagggaactaacatcccctgatggcggagaacctgggtacatccgggaaggcttcctggccgtgcagcatgctgtggaccgggccatcatggagtaccatgccgatgccgccacacgccagctgttccagagactgacggtgaccatcaagaggttcccgtacccgccgttcatcgcagaccccttcctcgtggccatccagtaccagctgcccctgctgctgctgctcagcttcacctacaccgcgctcaccattgcccgtgctgtcgtgcaggagaaggaaaggaggctgaaggagtacatgcgcatgatggggctcagcagctggctgcactggagtgcctggttcctcttgttcttcctcttcctcctcatcgccgcctccttcatgaccctgctcttctgtgtcaaggtgaagccaaatgtagccgtgctgtcccgcagcgacccctccctggtgctcgccttcctgctgtgcttcgccatctctaccatctccttcagcttcatggtcagcaccttcttcagcaaagccaacatggcagcagccttcggaggcttcctctacttcttcacctacatcccctacttcttcgtggcccctcggtacaactggatgactctgagccagaagctctgctcctgcctcctgtctaatgtcgccatggcaatgggagcccagctcattgggaaatttgaggcgaaaggcatgggcatccagtggcgagacctcctgagtcccgtcaacgtggacgacgacttctgcttcgggcaggtgctggggatgctgctgctggactctgtgctctatggcctggtgacctggtacatggaggccgtcttcccagggcagttcggcgtgcctcagccctggtacttcttcatcatgccctcctattggtgtgggaagccaagggcggttgcagggaaggaggaagaagacagtgaccccgagaaagcactcagaaacgagtactttgaagccgagccagaggacctggtggcggggatcaagatcaagcacctgtccaaggtgttcagggtgggaaataaggacagggcggccgtcagagacctgaacctcaacctgtacgagggacagatcaccgtcctgctgggccacaacggtgccgggaagaccaccaccctctccatgctcacaggtctctttccccccaccagtggacgggcatacatcagcgggtatgaaatttcccaggacatggttcagatccggaagagcctgggcctgtgcccgcagcacgacatcctgtttgacaacttgacagtcgcagagcacctttatttctacgcccagctgaagggcctgtcacgtcagaagtgccctgaagaagtcaagcagatgctgcacatcatcggcctggaggacaagtggaactcacggagccgcttcctgagcgggggcatgaggcgcaagctctccatcggcatcgccctcatcgcaggctccaaggtgctgatactggacgagcccacctcgggcatggacgccatctccaggagggccatctgggatcttcttcagcggcagaaaagtgaccgcaccatcgtgctgaccacccacttcatggacgaggctgacctgctgggagaccgcatcgccatcatggccaagggggagctgcagtgctgcgggtcctcgctgttcctcaagcagaaatacggtgccggctatcacatgacgctggtgaaggagccgcactgcaacccggaagacatctcccagctggtccaccaccacgtgcccaacgccacgctggagagcagcgctggggccgagctgtctttcatccttcccagagagagcacgcacaggtttgaaggtctctttgctaaactggagaagaagcagaaagagctgggcattgccagctttggggcatccatcaccaccatggaggaagtcttccttcgggtcgggaagctggtggacagcagtatggacatccaggccatccagctccctgccctgcagtaccagcacgagaggcgcgccagcgactgggctgtggacagcaacctctgtggggccatggacccctccgacggcattggagccctcatcgaggaggagcgcaccgctgtcaagctcaacactgggctcgccctgcactgccagcaattctgggccatgttcctgaagaaggccgcatacagctggcgcgagtggaaaatggtggcggcacaggtcctggtgcctctgacctgcgtcaccctggccctcctggccatcaactactcctcggagctcttcgacgaccccatgctgaggctgaccttgggcgagtacggcagaaccgtcgtgcccttctcagttcccgggacctcccagctgggtcagcagctgtcagagcatctgaaagacgcactgcaggctgagggacaggagccccgcgaggtgctcggtgacctggaggagttcttgatcttcagggcttctgtggaggggggcggctttaatgagcggtgccttgtggcagcgtccttcagagatgtgggagagcgcacggtcgtcaacgccttgttcaacaaccaggcgtaccactctccagccactgccctggccgtcgtggacaaccttctgttcaagctgctgtgcgggcctcacgcctccattgtggtctccaacttcccccagccccggagcgccctgcaggctgccaaggaccagtttaacgagggccggaagggattcgacattgccctcaacctgctcttcgccatggcattcttggccagcacgttctccatcctggcggtcagcgagagggccgtgcaggccaagcatgtgcagtttgtgagtggagtccacgtggccagtttctggctctctgctctgctgtgggacctcatctccttcctcatccccagtctgctgctgctggtggtgtttaaggccttcgacgtgcgtgccttcacgcgggacggccacatggctgacaccctgctgctgctcctgctctacggctgggccatcatccccctcatgtacctgatgaacttcttcttcttgggggcggccactgcctacacgaggctgaccatcttcaacatcctgtcaggcatcgccaccttcctgatggtcaccatcatgcgcatcccagctgtaaaactggaagaactttccaaaaccctggatcacgtgttcctggtgctgcccaaccactgtctggggatggcagtcagcagtttctacgagaactacgagacgcggaggtactgcacctcctccgaggtcgccgcccactactgcaagaaatataacatccagtaccaggagaacttctatgcctggagcgccccgggggtcggccggtttgtggcctccatggccgcctcagggtgcgcctacctcatcctgctcttcctcatcgagaccaacctgcttcagagactcaggggcatcctctgcgccctccggaggaggcggacactgacagaattatacacccggatgcctgtgcttcctgaggaccaagatgtagcggacgagaggacccgcatcctggcccccagcccggactccctgctccacacacctctgattatcaaggagctctccaaggtgtacgagcagcgggtgcccctcctggccgtggacaggctctccctcgcggtgcagaaaggggagtgcttcggcctgctgggcttcaatggagccgggaagaccacgactttcaaaatgctgaccggggaggagagcctcacttctggggatgcctttgtcgggggtcacagaatcagctctgatgtcggaaaggtgcggcagcggatcggctactgcccgcagtttgatgccttgctggaccacatgacaggccgggagatgctggtcatgtacgctcggctccggggcatccctgagcgccacatcggggcctgcgtggagaacactctgcggggcctgctgctggagccacatgccaacaagctggtcaggacgtacagtggtggtaacaagcggaagctgagcaccggcatcgccctgatcggagagcctgctgtcatcttcctggacgagccgtccactggcatggaccccgtggcccggcgcctgctttgggacaccgtggcacgagcccgagagtctggcaaggccatcatcatcacctcccacagcatggaggagtgtgaggccctgtgcacccggctggccatcatggtgcaggggcagttcaagtgcctgggcagcccccagcacctcaagagcaagttcggcagcggctactccctgcgggccaaggtgcagagtgaagggcaacaggaggcgctggaggagttcaaggccttcgtggacctgacctttccaggcagcgtcctggaagatgagcaccaaggcatggtccattaccacctgccgggccgtgacctcagctgggcgaaggttttcggtattctggagaaagccaaggaaaagtacggcgtggacgactactccgtgagccagatctcgctggaacaggtcttcctgagcttcgcccacctgcagccgcccaccgcagaggaggggcgatgaggggtggcggctgtctcgccatcaggcagggacaggacgggcaagcagggcccatcttacatcctctctctccaagtttatctcatcctttatttttaatcacttttttctatgatggatatgaaaaattcaaggcagtatgcacagaatggacgagtgcagcccagccctcatgcccaggatcagcatgcgcatctccatgtctgcatactctggagttcactttcccagagctggggcaggccgggcagtctgcgggcaagctccggggtctctgggtggagagctgacccaggaagggctgcagctgagctgggggttgaatttctccaggcactccctggagagaggacccagtgacttgtccaagtttacacacgacactaatctcccctggggaggaagcgggaagccagccaggttgaactgtagcgaggcccccaggccgccaggaatggaccatgcagatcactgtcagtggagggaagctgctgactgtgattaggtgctggggtcttagcgtccagcgcagcccgggggcatcctggaggctctgctcccttagggcatggtagtcaccgcgaagccgggcaccgtcccacagcatctcctagaagcagccggcacaggagggaaggtggccaggctcgaagcagtctctgtttccagcactgcaccctcaggaagtcgcccgccccaggacacgcagggaccaccctaagggctgggtggctgtctcaaggacacattgaatacgttgtgaccatccagaaaataaatgctgaggggacacaaaaaaaaaaaaaaaaaaaaaaaa

SEQ ID NO: 846 - DNA, 315 bp, Homo sapiens
  modified_base (3)..(3): a, c, t or g
  modified_base (5)..(5): a, c, t or g
  modified_base (7)..(7): a, c, t or g
  modified_base (13)..(13): a, c, t or g
  modified_base (26)..(26): a, c, t or g
  modified_base (33)..(33): a, c, t or g
  modified_base (195)..(195): a, c, t or g
  modified_base (206)..(206): a, c, t or g
  modified_base (262)..(262): a, c, t or g
  modified_base (296)..(296): a, c, t or g
  modified_base (314)..(314): a, c, t or g
aanananaaaagnatttccttgcggnacgcagnaatttttttttttttttttttttttttgggggaaagatctttatttactgatacagaacaatctgtgagatggtttagtctttaaaaaatggacaactgtgtatattatgctaccatttctttaaaaaaagaaaaaagaaaaaaaaagtaaagagaaggaancaaggattganaaaataagccacagcctgggaggaaaatatttgcaaaagacctatctgataaaggnctgttatacaaaatatacaaggaacacttaaaantcaacaataagaaaatgng

SEQ ID NO: 847 - DNA, 418 bp, Homo sapiens
  modified_base (233)..(233): a, c, t or g
  modified_base (272)..(272): a, c, t or g
  modified_base (289)..(289): a, c, t or g
  modified_base (356)..(356): a, c, t or g
  modified_base (402)..(402): a, c, t or g
  modified_base (412)..(412): a, c, t or g
ttttttttttttttgaagaggacagctaatatttattgagcactgataacacaagtatcatctgggtcaaaactccacaataattcaatgtgatactattactattcctatcttattgatacttgaagcatgaaaggcactaagttgtcagcatttacaatgatggcaagtgacagagcggcgtgaaggacggcagtgcagacctaagcctaatctgaattgccattctatgnaaatgactggtgatgttgtgtagtgtacccctgggcaanagatgggaaaaagtgantgctgggtggacatccaacaagtctgcatgacaatagcccccctgtctccagtctcctctctgatanatgacatcccccacaaaccacaaggagtggatctctctggcatganagcccaactntgtggg

SEQ ID NO: 848 - DNA, 408 bp, Homo sapiens
  modified_base (271)..(271): a, c, t or g
ttttttttttctgcctaaacatggaatttattgatatagtttggcacaactttagtcctatctttcccaatcccaggcatgttaacaatccttgaaaaatcatgctacattactttggaggaaaatacttccagatgaacatgtttcaagacatactagaaaattattcctatcaaaacatcctttttctgtgtcagctacctcatttctaatgcagtgcacatcaatctaatgtcagtatgaatacacatcaaccagggtgctgggcttnctaaagtgattcctttgcaggatgccaaaatgacagtcctggggggcagtgtacaggggagggccaagggggaaggccatgcctggctggccacatgtcttctgggatcatctccctctcctacggcagtgtttcaa

SEQ ID NO: 849 - DNA, 527 bp, Homo sapiens
  modified_base (319)..(319): a, c, t or g
  modified_base (389)..(389): a, c, t or g
  modified_base (439)..(439): a, c, t or g
  modified_base (461)..(461): a, c, t or g
  modified_base (466)..(466): a, c, t or g
  modified_base (496)..(496): a, c, t or g
  modified_base (520)..(520): a, c, t or g
gttaaagctacaggtcagtttatgaaacagaaaagtaggaatgcattttctgggtgaaagagtcacaccttagtgctataactctcctgcccatgatagtgtattctgtttcaggcaagcttattctttccttctttcattttaaatattgtcattacaaatcttaccaggttcacttaaaagctggctttcatccaactctaaacccacatattgaaaaaatcaaggtacaggaaaactccttgttatccttgtttccttagcttggtatgagacagatcggatccagtttcccatgcaccaacccactgcccatggnatgtctttggggaggtgtctgtgaagcagtcatacctgctcctcatctgcctgggaaagtcctcctattncagtgtccatgttgggcctccagtccttaaatgtcaccatgcttgtgggncaatggatccaaataagggtanccttnaggggttcagttaggacattgcaattttgnatagggttttccagttccctttgnttgtttt

SEQ ID NO: 850 - DNA, 2859 bp, Homo sapiens
gcggagaggagggacgggctgggagagggcccggactaggggcggcgggcaccgcaggagctccgcgcggctgcagcgcgggcgggagcggggacgcgatgtcgccgccgccgcctccttgcgggccggggctgcgcctccggggctgagccgccgccagagccgacagccgagcagccgctgggcgctcccgcggcgcaggaggatgggctgcggcgggagccgggcggatgccatcgagccccgctactacgagagctggacccgggagacagaatccacctggctcacctacaccgactcggacgcgccgcccagcgccgccgccccggacagcggccccgaagcgggcggcctgcactcgggcatgctggaagatggactgccctccaatggtgtgccccgatctacagccccaggtggaatacccaacccagagaagaagacgaactgtgagacccagtgcccaaatccccagagcctcagctcaggccctctgacccagaaacagaatggccttcagaccacagaggctaaaagagatgctaagagaatgcctgcaaaagaagtcaccattaatgtaacagatagcatccaacagatggacagaagtcgaagaatcacaaagaactgtgtcaactagcagagagtccaagcagaagggcagatggacttcttcagtgtccttcacggcactggatcccatcaaagaaccttgaagaagtggctgccccttgctggacctgaattctactgagtccctggcaagactgtcttacctggcagcaaactgctgcctgatttgttgggaccttctgagccttctacttatcatgtaaatgtattggcacagtgcttacatatgttaataaactgcaaatgtgcagttcagtttgtctctttgcaactcctgtaatacggtctggtgtaaaagtagtgagttaaagctacaggtcagtttatgaaacagaaaagtaggaatgcattttctgggtgaaagagtcacaccttagtgctataactctcctgcccatgatagtgtattctgtttcaggcaagcttattctttccttctttcattttaaatattgtcattacaaatcttaccaggttcacttaaaagctggctttcatccaactctaaacccacatattgaaaaaatcaaggtacaggaaaactccttgttatccttgtttccttagcttggtatgagacagatcggatccagtttcccatgcaccaacccactgcccatggcatgtctttgggaggtgtctgtgaagcagtcatacctgctcctcatctgcctggaaagtcctcctattccagtgtccatgttggcctccagtccttaatgtcaccatgcttgtggccaatgcatccaaataaggatacccctcagggctcagctagacattgcaattttgcatagctttccagttccctttgcttgtcttcttgactgtcttccctctctatcggggtcacttgcaattgttaatcaaagattgaacactgcgtaggagagggagatgatccagagacatgtggcagcaggcatggcttccccttggcctctctgtacactgccccaggactgtcattttggcatctgcaaaggaatcactttagaaagccagcacctggttgatgtgtattcatactgacattagattgatgtgcactgcattagaaatgaggtagctgacacagaaaaaggatgttttgataggaataattttctagtatgtcttgaaacatgttcatctggaagtattttcctccaaagtaatgtagcatgatttttcaaggattgttaacatgcctgggattgggaaagataggactaaagttgtgccaaactatatcaataaattccatgtttagcagaaataggcagcctattggtgttatgtttatgtaacatagtccagagaactgacatgcaggtcaaaagtcagatacgcaacctccttatctgctaactctgttattcttcaaacacaagtgggtagtgtcatttttccttccttccttccattggcagattgtatatttattcacaaaacattaaatgtccatcctgtgccaggtactatgcagatgttgagggatttggggtctggttagtcgtgactatctatcctgaatctaacagtgacttcataactaggagactgaattagacccttaaggtatagtgtgtgttgcaaatcactctgcaatggaaacttttatattcagggtaggtttgtgtcttaaactaggtgttctaatcaatgtacaagactttaccatacacgcaactatagtttttctaaaccttcatcattttgtgattctttgagaaagggcttttaggaactttatgttctaaaaaatgtttttaacaataataagataaaagaaaaacctgtgattcatatgtccccactggcattactcagcaggagcccccagctgccaaaggttggcagtgatcctgcaagttcaagggctctttctccctggggatgtgctttgtggcttctctttacagctttgtttctgcatcagttcactgctgcatgttgtttggaatttatcaccttaagaaagtgtctctgttttatatagaaacactttctcacttacaggggagaaggaaatgcagggcacatgatctggccctccccagaacaatctggatttcacggagacagcaaccagaagttaaaccatgtgactaaaaatgcatctggctactttttcatgtatgtatgagacagaaactaatccttactatcctattaggataccacttttcattgcaaagtttgtgtcaataaagtcattaattttaaacataaaaaaaaaaa

SEQ ID NO: 851 - DNA, 514 bp, Homo sapiens
  modified_base (14)..(14): a, c, t or g
  modified_base (218)..(218): a, c, t or g
  modified_base (408)..(408): a, c, t or g
  modified_base (433)..(433): a, c, t or g
  modified_base (471)..(471): a, c, t or g
  modified_base (490)..(490): a, c, t or g
acaaaaagcttcanctttattaaacaaaggaggaggtagaaaacagataagggaacagttagggatcccttctttcccctatacatacacagacatacaaacacacgcacccgagtgaatgacagggaccatcaggcgacagattgaagggcagagggaggcagcaccctccgagagttggcccggacccaagggtgggctgagacctgggccagggnagccgttccgaggggttatgcctgagcagtttggagatgaggtcctgggctcccgtgggcacagaagcggggaactttaggtccaccttgacgatgcggcgataggtctcgttgtgtgatgcactctcaaagggttgggttccccaccagcagctcatagcaaagcactccaattgcaccaccagatccnaccttctcattgttgcatgcgcccntcaatcatctctggggggcaggtagtccagggtgccanacattgtcttcctcctcanggagggcgcatgcacagaccagcc

SEQ ID NO: 852 - DNA, 472 bp, Homo sapiens
  modified_base (219)..(219): a, c, t or g
  modified_base (258)..(258): a, c, t or g
  modified_base (260)..(260): a, c, t or g
  modified_base (447)..(447): a, c, t or g
  modified_base (466)..(466): a, c, t or g
cggccgggagagtagcagtgccttggaccccagctctcctccccctttctctctaaggatggcccagaaggagaactcctacccctggccctacggcgacagacggctccatctggcctgagcaccctgccccagcgagtcctccggaaagagcctgtcaccccatctgcacttgtcctcatgagccgctccaatgtccagcccacaagctgcccctgnccagaaggtgatggagaatagcagtgggacacccgacantnttaacgcggcacttcacaattgatgactttgagattgggcgtcctctgggcaaaggcaagtttggaaacgtgtacttggctcgggagaagaaaagccatttcatcgtggcgctcaaggtcctcttcaagtcccagatagagaaggaaggcgttgaacatcagcttgcgcagagagatcgaaatccangccaacttgcaacattccnacattg

SEQ ID NO: 853 - DNA, 1224 bp, Homo sapiens
ggccgggagagtagcagtgccttggaccccagctctcctccccctttctctctaaggatggcccagaaggagaactcctacccctggccctacggccgacagacggctccatctggcctgagcaccctgccccagcgagtcctccggaaagagcctgtcaccccatctgcacttgtcctcatgagccgctccaatgtccagcccacagctgcccctggccagaaggtgatggagaatagcagtgggacacccgacatcttaacgcggcacttcacaattgatgactttgagattgggcgtcctctgggcaaaggcaagtttggaaacgtgtacttggctcgggagaagaaaagccatttcatcgtggcgctcaaggtcctcttcaagtcccagatagagaaggagggcgtggagcatcagctgcgcagagagatcgaaatccaggcccacctgcaccatcccaacatcctgcgtctctacaactatttttatgaccggaggaggatctacttgattctagagtatgccccccgcggggagctctacaaggagctgcagaagagctgcacatttgacgagcagcgaacagccacgatcatggaggagttggcagatgctctaatgtactgccatgggaagaaggtgattcacagagacataaagccagaaaatctgctcttagggctcaagggagagctgaagattgctgacttcggctggtctgtgcatgcgccctccctgaggaggaagacaatgtgtggcaccctggactacctgcccccagagatgattgaggggcgcatgcacaatgagaaggtggatctgtggtgcattggagtgctttgctatgagctgctggtggggaacccaccctttgagagtgcatcacacaacgagacctatcgccgcatcgtcaaggtggacctaaagttccccgcttctgtgcccacgggagcccaggacctcatctccaaactgctcaggcataacccctcggaacggctgcccctggcccaggtctcagcccacccttgggtccgggccaactctcggagggtgctgcctccctctgcccttcaatctgtcgcctgatggtccctgtcattcactcgggtgcgtgtgtttgtatgtctgtgtatgtataggggaaagaagggatccctaactgttcccttatctgttttctacctcctcctttgtttaataaaggctgaagctttttgt

SEQ ID NO: 854 - DNA, 408 bp, Homo sapiens
gagggcacatgtttatttagcagacaaggtggggctccatcagcggggtggcctggggagcagctgcatgggtggcactgtggggagggtctcccagctccctcaatggtgttcgggctggtgcggcactggcggcacctgtgcactcagccgtcgatacactggtcgattgggacagggaagacgatgtggttttcagggaggcccagagatttggagaagcggatgaagttctcctttagttccgaagtcagctccttggttctcccgtagagggtgatcttgaagtactccctgttttgagaaactttcttgaagaacaccatagcatgctggttgtagttggtgctcaccactcggacgaggtaactcgttaaatccagggtaactcttaatgttgcccagcgt

SEQ ID NO: 855 - DNA, 442 bp, Homo sapiens
  modified_base (309)..(309): a, c, t or g
  modified_base (322)..(322): a, c, t or g
  modified_base (411)..(411): a, c, t or g
  modified_base (417)..(417): a, c, t or g
aggacttttgttccaggttgccagcccggcgagttcacgctgggcaacattaagagttaccctggattaacgagttacctcgtccgagtggtgagcaccaactacaaccagcatgctatggtgttcttcaagaaagtttctcaaaacagggagtacttcaagatcaccctctacgggagaaccaaggagctgacttcggaactaaaggagaacttcatccgcttctccaaatctctgggcctccctgaaaaccacatcgtcttccctgtcccaatcgaccagtgtatcgacggctgagtgcacaggtgncgccagctgccgnaccagcccgaacaccattgagggagctgggagaccctccccacagtgccacccatgcagctgctccccaggccaaaccgctgatggagncccacnttgtctgctaaattaacatgtgccc

SEQ ID NO: 856 - DNA, 845 bp, Homo sapiens
caggtgagcctctcactcgccacctcctcttccacccctgccaggcccagcagccaccacagcgcctgcttcctcggccctgaaatcatgcccctaggtctcctgtggctgggcctagccctgttgggggctctgcatgcccaggcccaggactccacctcagacctgatcccagccccacctctgagcaaggtccctctgcagcagaacttccaggacaaccaattccaggggaagtggtatgtggtaggcctggcagggaatgcaattctcagagaagacaaagacccgcaaaagatgtatgccaccatctatgagctgaaagaagacaagagctacaatgtcacctccgtcctgtttaggaaaaagaagtgtgactactggatcaggacttttgttccaggttgccagcccggcgagttcacgctgggcaacattaagagttaccctggattaacgagttacctcgtccgagtggtgagcaccaactacaaccagcatgctatggtgttcttcaagaaagtttctcaaaacagggagtacttcaagatcaccctctacgggagaaccaaggagctgacttcggaactaaaggagaacttcatccgcttctccaaatctctgggcctccctgaaaaccacatcgtcttccctgtcccaatcgaccagtgtatcgacggctgagtgcacaggtgccgccagctgccgcaccagcccgaacaccattgagggagctgggagaccctccccacagtgccacccatgcagctgctccccaggccaccccgctgatggagccccaccttgtctgctaaataaacatgtgccctcaggccaaaaagaaa

SEQ ID NO: 857 - DNA, 398 bp, Homo sapiens
  modified_base (12)..(12): a, c, t or g
  modified_base (175)..(175): a, c, t or g
gaatgacgtgcntttattggaagctattctgacatcactttccagactgtctcactgtcttgggaccaggcatgggaggcaggggtgggaatcttcttgtgattgtgggtggtggctggaggagtggagtggtgggaggcggctcagtcgcgggcactcctgcgactggcggatncggtccggatggaataagccttcaggagcccaggacccgcactgctggagaagctcagggcattgatgccatggttcccccgagggtcagcccaatgccaccgccactgctactgccaccagtggaattcatcacagagatattcacggctcccactccatctccagccaaccggttctcctcgccctccagcagcttgcggtaggtggcgatctcgaatgtc

SEQ ID NO: 858 - DNA, 237 bp, Homo sapiens
  modified_base (27)..(27): a, c, t or g
cctacatgagcaaggtggagctggagncaaggtggatgccctgaatgatgagatcaacttcctcaggaccctcaatgagacggagttgacagagctgcagtcccagatctccgacacatctgtggtgctgtccatggacaacagtcgctccctggacctggacggcatcatcgctgaggtcaaggcgcagtatgaggagatggccaaatgcagccgggctgaggctgaagctggtac

SEQ ID NO: 859 - DNA, 571 bp, Homo sapiens
cctaaggcagggaccatgctgcaggagcagggcctgtaaaccagtcaatgctgctccttcatgcaacacggggacagctcggggctgagctccacaggcgaggggccaggcaggcatttaaagcagacacaaccactaacaggaaggaaggtcaggctggctttagtgcagggaagggtaatgatgggaggggatgttcacgaaggatagtgggtagctgaggcttcaaagggcctgcatgggacaggggtttagggggagtgaagagggacaatgaagtcttgggagtaaagatgggaataaacaggagaaaggaacgaggaggcaggtgctgggatgcagagtccagctgcgctgcacagcctgggcagcaggctgagtatgggctcctcactcccacctcctggccttcaaggccctacttgttgtcccagacagccatctttgtgaacacaggtcttgggaggaagcggctggacttcatgtaggcagagacttctccaagccctcaaatcgggagatgaagtcttcagtgttgggaagcattcagcagctggctcaatattggttt

SEQ ID NO: 860 - DNA, 481 bp, Homo sapiens
ccacagcaaccagcaccatgcccatgacactggggtactggaacatccgcgggctggcccattccatccgcctgctcctggaatacacagactcaagctacgaggaaaagaagtacacgatgggggacgctcctcgattatgacagaagccagtggctgaatgaaaaattcaagctgggcctggactttcccaatctgccctacttgattgatgggactcacaagatcacccagagcaacgccatcctgcggtacattgcccgcaagcacaacctgtgcggggaatcagaaaaggagcagattcgcgaagacattttggagaaccagtttatggacagccgtatgcagctggccaaactctgctatgacccagattttgagaaactgaaaccagaatacctgccaggactccctgaaatgctgaagctctactcacagtttctgggggagcagccatgtttcttggggacaagattacctt

SEQ ID NO: 861 - DNA, 394 bp, Homo sapiens
ttagcatagtcatcttagctttattgagtaaggcatcccaatctctgctaagattcttctaaatgaacggctgatttttctgccaaactatgcattggtcaaagagaaatcaccacctggccaccccattctgtccccctacaggacactaagggttcttacagataaagggacgatgcattcatgcctggagaactaatcacacctgatttctctgggatctaaaataatgtcaaatttgattcactttatgtaaagaaaatcttttttttctgcaaaccccttcagaacaatgctgccatccatgcaagatgtgtgtaaggccacctctgtatactaagaatggtgccccagcaggtggaaggatggcacacctgctgagcgtgggcacacg

SEQ ID NO: 862 - DNA, 421 bp, Homo sapiens
ccccagtgaggtcgtttttttggatgacatcggggctaatctgaagccagcccgtgacttgggaatggtcaccatcctggtccaggacactgacacggccctgaaagaactggagaaagtgaccggaatccagcttctcaataccccggcccctctgccgacctcttgcaatccaagtgacatgagccatgggtacgtgacagtaaagcccagggtccgtctgcattttgtggagctgggctccggccgtgctcgtgtgcctctgccatggatttcccgagagttggtattcttggaggtaccagatccctgctctggcccaggcaggttaccgggtcctagctatggacatgaaaggctatggagagtcatctgctcctcccgaaatagaagaatattgcatggaagtgttatgtaagga

SEQ ID NO: 863 - DNA, 2196 bp, Homo sapiens
ctgggcgggtcatgcgccctggccttcgcgcatctcccaggttagctgcgtgtccgggtgctaggctgcagacccgccgccatgacgctgcgcgcggccgtcttcgaccttgacggggtgctggcgctgccagcggtgttcggcgtcctcggccgcacggaggaggccctggcgctgcccagaggacttctgaatgatgctttccagaaagggggaccagagggtgccactacccggcttatgaaaggagagatcacactttcccagtggataccactcatggaagaaaactgcaggaagtgctccgagaccgctaaagtctgcctccccaagaatttctccataaaagaaatctttgacaaggcgatttcagccagaaagatcaaccgccccatgctccaggcagctctcatgctcaggaagaaaggattcactactgccatcctcaccaacacctggctggacgaccgtgctgagagagatggcctggcccagctgatgtgtgagctgaagatgcactttgacttcctgatagagtcgtgtcaggtgggaatggtcaaacctgaacctcagatctacaagtttctgctggacaccctgaaggccagccccagtgaggtcgtttttttggatgacatcggggctaatctgaagccagcccgtgacttgggaatggtcaccatcctggtccaggacactgacacggccctgaaagaactggagaaagtgaccggaatccagcttctcaataccccggcccctctgccgacctcttgcaatccaagtgacatgagccatgggtacgtgacagtaaagcccagggtccgtctgcattttgtggagctgggctccggccctgctgtgtgcctctgccatggatttcccgagagttggtattcttggaggtaccagatccctgctctggcccaggcaggttaccgggtcctagctatggacatgaaaggctatggagagtcatctgctcctcccgaaatagaagaatattgcatggaagtgttatgtaaggagatggtaaccttcctggataaactgggcctctctcaagcagtgttcattggccatgactggggtggcatgctggtgtggtacatggctctcttctaccccgagagagtgagggcggtggccagtttgaatactcccttcataccagcaaatcccaacatgtcccctttggagagtatcaaagccaacccagtatttgattaccagctctacttccaagaaccaggagtggctgaggctgaactggaacagaacctgagtcggactttcaaaagcctcttcagagcaagcgatgagagtgttttatccatgcataaagtctgtgaagcgggaggactttttgtaaatagcccagaagagcccagcctcagcaggatggtcactgaggaggaaatccagttctatgtgcagcagttcaagaagtctggtttcagaggtcctctaaactggtaccgaaacatggaaaggaactggaagtgggcttgcaaaagcttgggacggaagatcctgattccggccctgatggtcacggcggagaaggacttcgtgctcgttcctcagatgtcccagcacatggaggactggattccccacctgaaaaggggacacattgaggactgtgggcactggacacagatggacaagccaaccgaggtgaatcagatcctcattaagtggctggattctgatgcccggaacccaccggtggtctcaaagatgtagaacgcagcgtgtgcccacgctcagcaggtgtgccatccttccacctgctggggcaccattcttagtatacagaggtggccttacacacatcttgcatggatggcagcattgttctgaaggggtttgcagaaaaaaaagattttctttacataaagtgaatcaaatttgacattattttagatcccagagaaatcaggtgtgattagttctccaggcatgaatgcatcgtccctttatctgtaagaacccttagtgtcctgtagggggacagaatggggtggccaggtggtgatttctctttgaccaatgcatagtttggcagaaaaatcagccgttcatttagaagaatcttagcagagattgggatgccttactcaataaagctaagatgactatgctgctggctgtctttgttcttggagaggtggagtgactgttcacggagaa

SEQ ID NO: 864 - DNA, 480 bp, Homo sapiens
ttccctttcatacctttattcttttttttaaccaaaaaagtttttcttataaaataaattttgggcaaacatcatgcagcccttcttgatgattttctcccagagaacaaaattcaacagggccctgtggagcaaggagccccttttccctatctccttcctctaagagctacacccagaccagctggttatcagcggaggccccgctgtctcctctatgagaacgtctggtggaagacgaaggtgtatggcagtggaggcagcatcccaggcagcctggagtacctcatcccggagcccccacttatcagtgcagtggttccaccctgccaggtctgaagtgcagtcagaaccatcagggggtggccggatctgacggctgttgacacaacgtcggcagtgcaacctgtcatgtgtgtcactgaggctagcttcatccaggataaacagctccttcaactcgcccagagagaagtggcg

SEQ ID NO: 865 - DNA, 383 bp, Homo sapiens
cttccctttcttccatcacctcgctaaagaagctttgtaatcatccagctctaatctatgataagtgtgtggaagaggaggatggctttgtgggtgccttggacctcttccctcctggttacagctctaaggccctggagccccagctgtcaggtaagatgctggtcctggattatattctggcggtgacccgaagccgtagcagtgacaaagtagtgctggtgtcgaattacacccagactttggattctttgagaagctgtccgtgccgaagtacttatacgtccgcctggatggcacgatgtccattaagaagcgagccaaggttgtagaacgcttcaatagtccatcgagccctgactttgtcttcatgctgagcagca

SEQ ID NO: 866 - DNA, 3107 bp, Homo sapiens
cggtgagtcttggcggctgttaacgcgcgctttgggaacaggaaggttgagagagaggtgctggggtctgcgtctatctctgtcgctcttttcagcccctcctggtattcccctcctaacctgggttttttacacgcccgcgtggcttcctgctcgacctccctgagtctgatcctggtttccacctccagccctgggaaatttcctttctccagactcgccctccccacccgggcctcggactttcaccccagcttctctctcctggccagtgattacccacccccaatcccaccccgccccgccgcgcaactacctcctcccttcacccggactgggaccatcatccccactccactccgcccagtctgggactccacctgcctcctccccaatcccacactaatctctgcttggtctcttcctctttggcctaatctctcgtctcggcttattggggacggccactctcacagtttggttccaaacaccagttcctggatggattcccgccatccatgccccctctttaattagccggtcctctcagtaatgtagcagccccctctacagattagaccctggtcctacactcttagccgctgcctgcttttgacctttggctcatgggtacttgacgttttaaactcctaggcccaggatgaggaggagcttggctcccagccagctggccaagagaaaacctgaaggcaggtcctgtgatgatgaagactggcaacctggcctagtgactcctaggaaacggaaatccagcagtgagacccagatccaggagtgtttcctgtctccttttcggaaacctttgagtcagctaaccaatcaaccaccttgtctggacagcagtcagcatgaagcatttattcgaagcattttgtcaaagcctttcaaagtccccattccaaattatcaaggtcctctgggctctcgagcattgggcctgaaaagggctggggtccgccgggccctccatgaccccctggaaaaagatgccttggttctgtatgagcctcccccgctgagcgctcatgaccagctgaagcttgacaaggagaaactccctgtccatgtggttgttgaccctattctcagtaaggttttgcggcctcatcagagagagggagtgaaattcctgtgggagtgtgtcaccagtcggcgcatccctggcagccatggctgcatcatggctgatgagatgggcctaggaaagacgctgcagtgcatcacattgatgtggacacttttacgccagagtccagagtgcaagccagaaattgacaaggcagtggtggtgtcgccttccagcctggtgaagaactggtacaatgaggttgggaaatggctcggagggaggatccaacctctggccatcgatggaggatctaaggatgaaatagaccaaaagctggaaggattcatgaaccagcgtggagccagggtgtcttctcccatcctcatcatttcctatgagaccttccgccttcatgttggagtcctccagaaaggaagtgttggtctggtcatatgtgacgagggacacaggctcaagaactctgagaatcagacttaccaagccctggacagcttgaacaccagccggcgggtgctcatctccggaactcccatccagaatgatctgcttgagtatttcagcttggtacattttgttaattccggcatcctagggactgcccatgaattcaagaagcattttgaattgccaattttgaagggtcgagacgctgctgctagtgaggcagacaggcagctaggagaggagcggctgcgggagctcaccagcattgtgaatagatgcctgatacggaggacttctgatatcctttctaaatatctgcctgtgaagattgagcaggtcgtttgttgtaggctgacaccccttcagactgagttatacaagaggtttctgagacaagccaaaccggcagaagaattgcttgagggcaagatgagtgtgtcttccctttcttccatcacctcgctaaagaagctttgtaatcatccagctctaatctatgataagtgtgtggaagaggaggatggctttgtgggtgccttggacctcttccctcctggttacagctctaaggccctggagccccagctgtcaggtaagatgctggtcctggattatattctggcggtgacccgaagccgtagcagtgacaaagtagtgctggtgtcgaattacacccagactttggatctctttgagaagctgtgccgtgcccgaaggtacttatacgtccgcctggatggcacgatgtccattaagaagcgagccaaggttgtagaacgcttcaatagtccatcgagccctgactttgtcttcatgctgagcagcaaagctgggggctgtggcctcaatctcattggggctaaccggctggtcatgtttgaccctgactggaacccagccaatgatgaacaagccatggcccgggtctggcgagatggtcaaaagaagacttgctatatctaccgcctgctgtctgcagggaccattgaggagaagatcttccagcgtcagagccacaagaaggcactgagcagctgtgtggtggatgaggagcaggatgtagagcgccacttctctctgggcgagttgaaggagctgtttatcctggatgaagctagcctcagtgacacacatgacaggttgcactgccgacgttgtgtcaacagccgtcagatccggccaccccctgatggttctgactgcacttcagacctggcagggtggaaccactgcactgataagtgggggctccgggatgaggtactccaggctgcctgggatgctgcctccactgctatcaccttcgtcttccaccagcattctcatgaggaacagcggggcctccgctgataaccagctggtctgggtgtagctcttagaggaaggagatagggaaaaggggctccttgctccacagggccctgttgaattttgttctctgggagaaaatcatcaagaagggctgcatgatgtttgcccaaaatttattttataagaaaaacttttttggttaaaaaaaagaataaaggtatgaaagggttaaaaaaaaaaa

SEQ ID NO: 867 - DNA, 433 bp, Homo sapiens
  modified_base (274)..(274): a, c, t or g
attttaattaaggtttatttcaatagcaaaaatgacttcaagattttgcatgaattattttttaaacaaaactatatgaaaaatatgtacaaatcagtcatcaatgtcattgacatttttatgaacaagtttcaaatgaaaaatatcccatcataacaaaggtacataaataaataaatgctgacaatactggccctaaagtctaacacaactgttagactaatcagggataccgctttctactacgtgagggagcacataatcaatgtttccngccaaaagggcaaggtactgggtttgtgtagggtttatttagggcccggttgacagcccccattattttgagggtgtgggcctaccttggtttctctttccataggtgtttggatgggccacaggtggccagggccttgggggcacccgggaggcctgg

SEQ ID NO: 868 - DNA, 3084 bp, Homo sapiens
agttggcgggaatggctgctcgcggaggggcagtgtacgcggggccgctgtaggctgtccagcgatggatcccaccgcgggaagcaagaaggagcctggaggaggcgcggcgactgaggagggcgtgaataggatcgcagtgccaaagccgccctccattgaggaattcagcatagtgaagcccattagccggggcgccttcgggaaagtgtatctggggcagaaaggcggcaaattgtatgcagtaaaggttgttaaaaaagcagacatgatcaacaaaaatatgactcatcaggtccaagctgagagagatgcactggcactaagcaaaagcccattcattgtccatttgtattattcactgcagtctgcaaacaatgtctacttggtaatggaatatcttattgggggagatgtcaagtctctcctacatatatatggttattttgatgaagagatggctgtgaaatatatttctgaagtagcactggctctagactaccttcacagacatggaatcatccacagggacttgaaaccggacaatatgcttatttctaatgagggtcatattaaactgacggattttggcctttcaaaagttactttgaatagagatattaatatgatggatatccttacaacaccatcaatggcaaaacctagacaagattattcaagaaccccaggacaagtgttatcgcttatcagctcgttgggatttaacacaccaattgcagaaaaaaatcaagaccctgcaaacatcctttcagcctgtctgtctgaaacatcacagctttctcaaggactcgtatgccctatgtctgtagatcaaaaggacactacgccttattctagcaaattactaaaatcatgtcttgaaacagttgcctccaacccaggaatgcctgtgaagtgtctaacttctaatttactccagtctaggaaaaggctggccacatccagtgccagtagtcaatcccacaccttcatatccagtgtggaatcagaatgccacagcagtcccaaatgggaaaaagattgccaggaaagtgatgaagcattgggcccaacaatgatgagttggaatgcagttgaaaagttatgcgcaaaatctgcaaatgccattgagacgaaaggtttcaataaaaaggatctggagttagctctttctcccattcataacagcagtgcccttcccaccactggacgctcttgtgtaaaccttgctaaaaaatgcttctctggggaagtttcttgggaagcagtagaactggatgtaaataatataaatatggacactgacacaagtcagttaggtttccatcagtcaaatcagtgggctgtggattctggtgggatatctgaagagcaccttgggaaaagaagtttaaaaagaaattttgagttggttgactccagtccttgtaaaaaaattatacagaataaaaaaacttgtgtagagtataagcataacgaaatgacaaattgttatacaaatcaaaatacaggcttaacagttgaagtgcaggaccttaagctatcagtgcacaaaagtcaacaaaatgactgtgctaataaggagaacattgtcaattcttttactgataaacaacaaacaccagaaaaattacctataccaatgatagcaaaaaaccttatgtgtgaactcgatgaagactgtgaaaagaatagtaagagggactacttaagttctagttttctatgttctgatgatgatagagcttctaaaaatatttctatgaactctgattcatcttttcctggaatttctataatggaaagtccattagaaagtcagcccttagattcagatagaagcattaaagaatcctcttttgaagaatcaaatattgaagatccacttattgtaacaccagattgccaagaaaagacctcaccaaaaggtgtcgagaaccctgctgtacaagagagtaaccaaaaaatgttaggtcctcctttggaggtgctgaaaacgttagcctctaaaagaaatgctgttgcttttcgaagttttaacagtcatattaatgcatccaataactcagaaccatccagaatgaacatgacttctttagatgcaatggatatttcgcgtgcctacagtggttcatatcccatggctataacccctactcaaaaaagaagatcctgtatgccacatcagaccccaaatcagatcaagtcgggaactccataccgaactccgaagagtgtgagaagaggggtggcccccgttgatgatgggcgaattctaggaaccccagactaccttgcacctgagctgttactaggcagggcccatggtcctgcggtagactggtgggcacttggagtttgcttgtttgaatttctaacaggaattccccctttcaatgatgaaacaccacaacaagtattccagaatattctgaaaagagatatcccttggccagaaggtgaagaaaagttatctgataatgctcaaagtgcagtagaaatacttttaaccattgatgatacaaagagagctggaatgaaagagctaaaacgtcatcctctcttcagtgatgtggactgggaaaatctgcagcatcagactatgcctttcatcccccagccagatgatgaaacagatacctcctattttgaaaccaggaatactgctcagcacctgaccgtatctggatttagtctgtagcacaaaaattttccttttagtctagcctcgtgttatagaatgaacttgcataattatatactccttaatactagattgatctaagggggaaagatcattatttaacctagttcaatgtgcttttaatgtacgttacagctttcacagagttaaaaggctgaaaggaatatagtcagtaatttatcttaacctcaaaactgtatataaatcttcaaagcttttttcatctatttattttgtttattgcactttatgaaaactgaagcatcaataaaattagaggacactattgagagtgagccactagcttgattttctttctcctctgatttcagttcactgttcagtttagcattaaaataataaaataatcatacagttcc

SEQ ID NO: 869 - DNA, 425 bp, Homo sapiens
aaaaaacgcacaaaaccctgttttaatggaagtcaggcccaggctagaagatgacaatctacaaacacttttattagcaaaaggagtaagtgcagcatgggagaaagaggggctcctccttcccctcaaaggcatcactgccccttcccaagggcaggccagcagggaacaagaggaccccagggttgcaagcaggctggaatcagacaaaagtgatccgtgtccgggaagcattgacctgccagacattgagctcctcatattcatccagagccgcctggaactgggcgggtgtgaagccacgagatacacagcgctgctctgcctcagagaaccggacacttcggccccctgagaccagttcacggacggtggcaaatatcacatctgctggtctctgagtcctagctgtctgccccttgtct

SEQ ID NO: 870 - DNA, 453 bp, Homo sapiens
cgcacagcatccacgaggtcatggagcagcagaccatctccattgccaaggccggcattctcaccacactcaatgcccgctgctccatcctggctgccgccaaccctgcctacgggcgctacaaccctcgccgcagcctggagcagaacatacagctacctgctgcactgctctcccggtttgacctcctctggctgattcaggaccggcccgaccgagacaatgacctacggttggcccagcacatcacctatgtgcaccagcacagccggcagcccccctcccagtttgaacctctggacatgaagctcatgaggcgttacatagccatgtgccgcgagaagcagcccatggtgccagagtctctggctgactacatcacagcagcatacgtggagatgaggcgagaggcttgggctagtaaggatgccactatacttctgcccggaccct

SEQ ID NO: 871 - DNA, 2900 bp, Homo sapiens
agtgtcgtgtaaacagtgtccttccgcgcggcggccgcggagagagctgcggcccgggggggcgtgcctgggatccggagcttcgctcgggcccgggaaaggcggcagtgggctgggatcgcggtgtctctgggtgtgatggccaatggctggactggctcccgccctgggcggaggaatcccgagctgtgaagcggctggaatccgggcccatgtgcttctttgtttactaagagcggaagcgatggcgggagcgggggtggggtgcggtggcggggtgcggtggcggaggtcccggtgaaatcaggggctaaggggacccaaagaaggcgggggatcataggggtggaaagaaagctgagaaccttgagaccggagtgtgaggggccaacggggaagggcgctagaattttaaactaaagtagggaccggaattcccctggggagatgttggatggccctgtgcactgccacgggctctttattcttcgctggttagaaacagacttgtgaaaaagagttatgcccactttggggagacttcgaaaaggttaagaagttcttacaagagttctaccaggatgatgaactcgggaagaagcagttcaagtatgggaaccagttggttcggctggctcatcgggaacaggtggctctgtatgtggacctggacgacgtagccgaggatgaccccgagttggtggactcaatttgtgagaatgccaggcgctacgcgaagctctttgctgatgccgtacaagagctgctgcctcagtacaaggagagggaagtggtaaataaagatgtcctggacgtttacattgagcatcggctaatgatggagcagcggagtcgggaccctgggatggtccgaagcccccagaaccagtaccctgctgaactcatgcgcagattgtgagtggtctctgtcgggaaagatgtagggattggttctccaggatcttgtttgtgactgttttctccccttagtgagctgtattttcaaggccctagcagcaacaagcctcgtgtgatccgggaagtgcgggctgactctgtggggaagttggtaactgtgcgtggaatcgtcactcgtgtctctgaagtcaaacccaagatggtggtggccacttacacttgtgaccagtgtggggcagagacctaccagccgatccagtctcccactttcatgcctctgatcatgtgcccaagccaggagtgccaaaccaaccgctcaggagggcggctgtatctgcagacacggggctccagattcatcaaattccaggagatgaagatgcaagaacatagtgatcaggtgcctgtgggaaatatccctcgtagtatcacggtgctggtagaaggagagaacacaaggattgcccagcctggagaccacgtcagcgtcactggtattttcttgccaatcctgcgcactgggttccgacaggtggtacagggtttactctcagaaacctacctggaagcccatcggattgtgaagatgaacaagagtgaggatgatgagtctggggctggagagctcaccagggaggagctgaggcaaattgcagaggaggatttctacgaaaagctggcagcttcaatcgccccagaaatatacgggcatgaagatgtgaagaaggcactgctgctcctgctagtcgggggtgtggaccagtctcctcgaggcatgaaaatccggggcaacatcaacatctgtctgatgggggatcctggtgtggccaagtctcagctcctgtcatacattgatcgactggcgcctcgcagccagtacacaacaggccggggctcctcaggagtggggcttacggcagctgtgctgagagactccgtgagtggagaactgaccttagagggtggggccctggtgctggctgaccagggtgtgtgctgcattgatgagttcgacaagatggctgaggccgaccgcacagccatccacgaggtcatggagcagcagaccatctccattgccaaggccggcattctcaccacactcaatgcccgctgctccatcctggctgccgccaaccctgcctacgggcgctacaaccctcgccgcagcctggagcagaacatacagctacctgctgcactgctctcccggtttgacctcctctggctgattcaggaccggcccgaccgagacaatgacctacggttggcccagcacatcacctatgtgcaccagcacagccggcagcccccctcccagtttgaacctctggacatgaagctcatgaggcgttacatagccatgtgccgcgagaagcagcccatggtgccagagtctctggctgactacatcacagcagcatacgtggagatgaggcgagaggcttgggctagtaaggatgccacctatacttctgcccggaccctgctggctatcctgcgcctttccactgctctggcacgtctgagaatggtggatgtggtggagaaagaagatgtgaatgaagccatcaggctaatggagatgtcaaaggactctcttctaggagacaaggggcagacagctaggactcagagaccagcagatgtgatatttgccaccgtccgtgaactggtctcagggggccgaagtgtccggttctctgaggcagagcagcgctgtgtatctcgtggcttcacacccgcccagttccaggcggctctggatgaatatgaggagctcaatgtctggcaggtcaatgcttcccggacacggatcacttttgtctgattccagcctgcttgcaaccctggggtcctcttgttccctgctggcctgccccttgggaaggggcagtgatgcctttgaggggaaggaggagcccctctttctcccatgctgcacttactccttttgctaataaaagtgtttgtagattgtc

SEQ ID NO: 872 - DNA, 303 bp, Homo sapiens
ttttttacaggtgcaaagattcactttatttattcattctcctccaacattagcataattaaagccaaggaggaggaggggggtgaggtgaaagatgagctggaggaccgcaataggggtaggtcccctgtggaaaaagggtcagaggccaaaggatgggagggggtcaggctggaactgaggagcaggtgggggcacttctccctctaacactctcccctgttgaagctctttgtgacgggcgagctcaggccctgatgggtgacttcgcaggcgtagactttgtgtttctcgtagtctgct

SEQ ID NO: 873 - DNA, 545 bp, Homo sapiens
  modified_base (12)..(12): a, c, t or g
  modified_base (322)..(322): a, c, t or g
  modified_base (358)..(358): a, c, t or g
  modified_base (382)..(382): a, c, t or g
  modified_base (444)..(444): a, c, t or g
  modified_base (464)..(464): a, c, t or g
  modified_base (470)..(470): a, c, t or g
  modified_base (478)..(478): a, c, t or g
  modified_base (484)..(484): a, c, t or g
  modified_base (499)..(499): a, c, t or g
  modified_base (506)..(506): a, c, t or g
  modified_base (532)..(532): a, c, t or g
  modified_base (542)..(542): a, c, t or g
ttacaaatcaangaaatttattggcgttgacaaaaatacataatacagaaaccaaaacaaaacacaacagaaacaaaaccagaaaccccagcctagtgggcccatgtgcctgatgtactgacagtgtgccgacccagactcccacaaagcatggcacttaattcatgaggacctccatctgcaccagcctcgcattggtgtccccagacgttcggtatggtatcattccagcaaaggtaatcagagtgcgggcttgacttcggagttgagagtcgcggtcctcgatgactcgctggggcctgggatgacgaggatggacttntcccctttgagcctcttaaactgtgtgaacaagatnttcatgggttgcaagaagcacttntgagaggttgtgccctgatttcatcactggaaatttctgaaggcagccactctcttttccanactttcctggattcaggggnaccagntttcaagngctcangtgatatcaaaaagntctatcnaattatgacccacttatggatacttngtcaaaaaanggt

SEQ ID NO: 874 - DNA, 378 bp, Homo sapiens
  modified_base (290)..(290): a, c, t or g
  modified_base (319)..(319): a, c, t or g
  modified_base (326)..(326): a, c, t or g
  modified_base (365)..(365): a, c, t or g
tttctgcgctgtgtgagtgagcttgtgattgaaagccgagagttcgatatgattcttgggaaactagagaatgacggaagtagaaagcctggagtcatagataagtttactagtgacacaaagcctattatcaacaaagttgcttctgtggcagaaaataaaggactgtttgaagaggcagcaaagctgttattgaccttgccaaggaatgcttgacaaggtactgggagcttgatggaacaaacttgcttgagcccttgttcgtccccccagatccagttgccccgcantcccaacaagggggaggcttgaaggaacntgggcanttttccttttgcccgaacggttttaggggctccaagggntttaaggcgccaa

SEQ ID NO: 875 - DNA, 2674 bp, Homo sapiens
gacggctgtagcacaaggatctgcatctccaatggatactgaggggtttggtgagctccttcagcaagctgaacagcttgctgctgagactgagggcatctcagagcttccccatgtggaacggaacttacaggagatccagcaggcgggagagcgcctgcgttcccgtaccctaacacgcacgtcccaggagacggcagatgtcaaggcgtcagttctcctcgggtctcggggacttgacatatcccacatctcccagcgattggagagtctgagtgcagccaccacctttgagcctcttgagcctgtgaaggacactgacattcagggcttcctgaagaatgagaaggacaatgccctgctgtctgccatcgaagagtcccggaagaggaccttcggcatggctgaggagtaccatcgggagtcaatgttggttgagtgggagcaagtgaaacagcgaattctgcacacactgctggcatcaggagaagacgcccttgactttactcaagaaagcgagccaagctacatcagtgatgtgggaccccctggtcgaagctctctggataacatcgagatggcctatgcgcggcaaatttatatctataatgagaaaattgtaaatggacacctgcagcctaacctggtggacctttgtgcttccgtcgcagagctcgatgataagagcatttccgacatgtggaccatggtaaaacaaatgacagacgtgttgttgacaccggcaacggatgccctgaagaaccgcagcagcgtggaagtgcgcatggagtttgtcaggcaggccttggcgtaccttgagcagagttataagaattacacccttgtgactgtctttggaaatttgcatcaggcccagctgggcggggtgcctgggacttaccaattggttcgaagtttcctgaacattaaactgccagctcccttgcctggactacaggatggagaggtggaaggccatcctgtgtgggcgctaatttactactgcatgcgctgtggagacctgcttgccgcttcacaggtagttaatcgagcccagcaccagctgggagagtttaaaacctggttccaggagtacatgaacagcaaggacagaagattgtccccagctacggaaaacaagctccggctgcattaccgtagggccctcaggaacaatacagatccctacaagcgggccgtgtactgtatcattggcagatgtgacgtcaccgacaaccagagtgaagtggcggacaaaactgaggattacctgtggctgaagttgaaccaagtgtgttttgacgacgatggcaccagctccccacaagacaggctcactctctcacagttccagaagcagttgttggaagactatggcgagtcccactttacggtgaaccagcaacccttcctctacttccaagtcctgttcctgacagcgcagtttgaagcagcagttgcctttcttttccgcatggagcggctgcgctgccatgctgtccatgtagcactggtgctgtttgagctgaagctgcttttaaagtcctctggacagagggctcagctcctcagccacgagcctggtgaccctccttgcttgcggcggctgaacttcgtgcggctcctcatgctgtacacccggaagtttgagtccacggacccaagggaggccctccagtacttctatttcctcagggatgagaaagatagtcaaggagaaaacatgtttctgcgctgtgtgagtgagcttgtgattgaaagccgagagttcgatatgattcttgggaaactagagaatgacggaagtagaaagcctggagtcatagataagtttactagtgacacaaagcctattatcaacaaagttgcttctgtggcagaaaataaaggactgtttgaagaggcagcaaagctgtatgaccttgccaagaatgctgacaaggtactggagctgatgaacaaactgctgagccctgtcgtcccccagatcagtgccccgcaatccaacaaggagaggctgaagaacatggcactctccattgccgaacggtatagggctcaaggaataagcgcaaataaatttgtggactccacgttctatcttcttttggacttgatcaccttttttgacgagtatcatagtggtcatattgatagagcttttgatatcattgagcgcttgaagctggtgcccctgaatcaggaaagtgtggaagagagagtggctgccttcagaaatttcagtgatgaaatcaggcacaacctctcagaagtgcttcttgccaccatgaacatcttgttcacacagtttaagaggctcaaggggacaagtccatcctcgtcatccaggccccagcgagtcatcgaggaccgcgactctcaactccgaagtcaagcccgcactctgattacctttgctggaatgataccataccgaacgtctggggacaccaatgcgaggctggtgcagatggaggtcctcatgaattaagtgccatgctttgtgggagtctgggtcggcacactgtcagtacatcaggcacatgggcccactaggctggggtttctggttttgtttctgttgtgttttgttttggtttctgtattatgtatttttgtcaacgccaataaatttctttgatttgtaaaaaaaaaaaaaaaaaaaaaaaaaaaa

SEQ ID NO: 876 - DNA, 575 bp, Homo sapiens
cataataaaattcattctttattgagtgcatggtggcccaggtgctattccatgtatgtcataggtgtgaaaccttaaatctttccaacagccactgccttatggagactgtatcatccttatcttcatcttacaggtgagaaatctgcagtgaagaaaggtacatcccacggggacaccgacagtaagcagcggcgtggattccagacacgtggctgggcctctgcaggaagaaatcaaacgtgtggaagggttggggagaggagatgcctagaagggattttcctgtattctcttagtggtgggggtaagaccgaggacccaagtcctcactcatcacgtcctccccagtgatgcaaggatggagctggggtaaaaccagggagaatcaggaccctcacgtcgctgcgtttattaagcatcagggtcagagctgggcaggagaggaggggaggcaaggtctaggtgagagacgttctggaaccagccagtggggtggtaggtcgggaggtagatgtcacatgtcagggtcacttggcctgaatggttttttggatccagttcgtgtatctgca

SEQ ID NO: 877 - DNA, 590 bp, Homo sapiens
attcggcacgatggagatcacccagaacatgttgtgtgctggggatgagaagtacgggaaggattcctgccagggtgattctgggggtccgctggtatgtggagaccacctccgaggccttgtgtcatggggtaacatcccctgtggatcaaaggagaagccaggagtctacaccaacgtctgcagatacacgaactggatccaaaaaaccattcaggccaagtgaccctgacatgtgacatctacctcccgacctaccaccccactggctggttccagaacgtctctcacctagaccttgcctcccctcctctcctgcccagctctgaccctgatgcttaataaacgcagcgacgtgagggtcctgattctccctggttttaccccagctccatccttgcatcactcgggaggacgtgatgagtgaggacttgggtcctcggtcttacccccaccactaagagaatacaggaaaatcccttctaggcatctcctctccccaacccttccacacgtttgatttcttcctgcagaggcccagccacgtgtctggaatcccagctccgctgcttactgtcggtgtccccttg

SEQ ID NO: 878 - DNA, 1527 bp, Homo sapiens
ggcggacaaagcccgattgttcctgggccctttccccatcgcgcctgggcctgctccccagcccggggcaggggcgggggccagtgtggtgacacacgctgtagctgtctccccggctggctggctcgctctctcctggggacacagaggtcggcaggcagcacacagagggacctacgggcagctgttccttcccccgactcaagaatccccggaggcccggaggcctgcagcaggagcggccatgaagaagctgatggtggtgctgagtctgattgctgcagcctgggcagaggagcagaataagttggtgcatggcggaccctgcgacaagacatctcacccctaccaagctgccctctacacctcgggccacttgctctgtggtggggtccttatccatccactgtgggtcctcacagctgcccactgcaaaaaaccgaatcttcaggtcttcctggggaagcataaccttcggcaaagggagagttcccaggagcagagttctgttgtccgggctgtgatccaccctgactatgatgccgccagccatgaccaggacatcatgctgttgcgcctggcacgcccagccaaactctctgaactcatccagccccttcccctggagagggactgctcagccaacaccaccagctgccacatcctgggctggggcaagacagcagatggtgatttccctgacaccatccagtgtgcatacatccacctggtgtcccgtgaggagtgtgagcatgcctaccctggccagatcacccagaacatgttgtgtgctggggatgagaagtacgggaaggattcctgccagggtgattctgggggtccgctggtatgtggagaccacctccgaggccttgtgtcatggggtaacatcccctgtggatcaaaggagaagccaggagtctacaccaacgtctgcagatacacgaactggatccaaaaaaccattcaggccaagtgaccctgacatgtgacatctacctcccgacctaccaccccactggctggttccagaacgtctctcacctagaccttgcctcccctcctctcctgcccagctctgaccctgatgcttaataaacgcagcgacgtgagggtcctgattctccctggttttaccccagctccatccttgcatcactggggaggacgtgatgagtgaggacttgggtcctcggtcttacccccaccactaagagaatacaggaaaatcccttctaggcatctcctctccccaacccttccacacgtttgatttcttcctgcagaggcccagccacgtgtctggaatcccagctccgctgcttactgtcggtgtccccttgggatgtacctttcttcactgcagatttctcacctgtaagatgaagataaggatgatacagtctccataaggcagtggctgttggaaagatttaaggtttcacacctatgacatacatggaatagcacctgggccaccatgcactcaataaagaatgaattttattatgaaaaaaaaaaaaaaaa

SEQ ID NO: 879 - DNA, 564 bp, Homo sapiens
aagagagaggcaattttattcttccaaaaaaatgcaccaagagagggtgagcacaggagcacccctggccacatcccccatcctaagcagggtctgagatgaggccaggcctgacgtgggcttgggagaagctgacggagctccctgtggccttggggagggaaccaggcagacctggaagtggaactttgttgttagcaccaggagccgcccacagctgggctcggcaacagggcagcacatggccctgttgctgccacctgagagtctggggaggggctggtggcagaaggctccctgcaggaggtcaactgaatgactctcagattcacaggacccgctctatccccacaacccctgtaaacatgagaatgggctcgtgacaccctcaaaacctcaggacaagatgagggttccaagatgtttggctgggcttcaaggcggcccaggaacctgccgggctttctcctgcatgaaaaagctggtgcctgggtcccccggaggccaacggtcttccaggcaatggacattgggggaaggtttcgtgaagtggctttcggggct

SEQ ID NO: 880 - DNA, 537 bp, Homo sapiens
gcctagtgcagctgcaacgttcacatcagcagcaagtcctgccaccccgccagccttccgcccgggtgcccagtgtgaccgagtaccgcctggatggccacaccatctcagacctgagccggagcagccggggcaggctgatccccatctcccccagcactgaagtcgggggctctggcattggcacaccgccctctgtgctcaagcggcagaggaagaggcgtgtggctctgtcccctgtcactgagaatagcaccagtctgtccttcctggattcctgtaacagcctcacgcccaagagcacacctgttaagaccctgcccttctcgccctcccagtttctgaacttctggaacaaacaggacacattggagctggagagcccctcgctgacatccagcccagtgtgcagccagaaggtggtggtcaccacacgactgcaccgggacaagacacccctgcaccagaaacatggtgcgtttgtaaccgcagatcagaagtactccatggacaacactccccacacggcaaccccgt

SEQ ID NO: 881 - DNA, 214 bp, Homo sapiens
tttagttgtaattctttatttgaacatcaaataggttgagaaaattgtttacaggtgctcgagcatcccgctggattctttttcaaagtgcaaaagaggtttacaagtgtgtttcattaaacaaagcaaagctgcgacaaaaccgagtcacatcagtaatagtatgcatcggcaaaagggcatattaatccatcaaacacaatttggcatttga

SEQ ID NO: 882 - DNA, 520 bp, Homo sapiens
tgaaaacttactctcaactggagcaaatgaactttggtcccaaatatccatcttttcagtagcgttaattatgctctgtttccaactgcatttcctttccaattgaattaaagtgtggcctcgtttttagtcatttaaaattgttttctaagtaattgctgcctctattatggcacttcaattttgcactgtcttttgagattcaagaaaaatttctattcttttttttgcatccaattgtgcctgaacttttaaaatatgtaaatgctgccatgttccaaacccatcgtcagtgtgtgtgtttagagctgtcaccctagaaacaacatattgtcccatgagcaggtgcctgagacacagacccctttgcattcacagagaggtcattggttatagagacttgaattaataagtgacattatgccagtttctgttctctcacaggtgataaacaatgctttttgtgcactacatactcttcagtgtagagctcttgttttatgggaaaaggctcaaatgc

SEQ ID NO: 883 - DNA, 6456 bp, Homo sapiens
gagttgtgcctggagtgatgtttaagccaatgtcagggcaaggcaacagtccctggccgtcctccagcacctttgtaatgcatatgagctcgggagaccagtacttaaagttggaggcccgggagcccaggagctggcggagggcgttcgtcctgggactgcacttgctcccgtcgggtcgcccggcttcaccggacccgcaggctcccggggcagggccggggccagagctcgcgtgtcggcgggacatgcgctgcgtcgcctctaacctcgggctgtgctctttttccaggtggcccgccggtttctgagccttctgccctgcggggacacggtctgcaccctgcccgcggccacggaccatgaccatgaccctccacaccaaagcatccgggatggccctactgcatcagatccaagggaacgagctggagcccctgaaccgtccgcagctcaagatccccctggagcggcccctgggcgaggtgtacctggacagcagcaagcccgccgtgtacaactaccccgagggcgccgcctacgagttcaacgccgcggccgccgccaacgcgcaggtctacggtcagaccggcctcccctacggccccgggtctgaggctgcggcgttcggctccaacggcctggggggtttccccccactcaacagcgtgtctccgagcccgctgatgctactgcacccgccgccgcagctgtcgcctttcctgcagccccacggccagcaggtgccctactacctggagaacgagcccagcggctacacggtgcgcgaggccggcccgccggcattctacaggccaaattcagataatcgacgccagggtggcagagaaagattggccagtaccaatgacaagggaagtatggctatggaatctgccaaggagactcgctactgtgcagtgtgcaatgactatgcttcaggctaccattatggagtctggtcctgtgagggctgcaaggccttcttcaagagaagtattcaaggacataacgactatatgtgtccagccaccaaccagtgcaccattgataaaaacaggaggaagagctgccaggcctgccggctccgcaaatgctacgaagtgggaatgatgaaaggtgggatacgaaaagaccgaagaggagggagaatgttgaaacacaagcgccagagagatgatggggagggcaggggtgaagtggggtctgctggagacatgagagctgccaacctttggccaagcccgctcatgatcaaacgctctaagaagaacagcctggccttgtccctgacggccgaccagatggtcagtgccttgttggatgctgagccccccatactctattccgagtatgatcctaccagacccttcagtgaagcttcgatgatgggcttactgaccaacctggcagacagggagctggttcacatgatcaactgggcgaagagggtgccaggctttgtggatttgaccctccatgatcaggtccaccttctagaatgtgcctggctagagatcctgatgattggtctcgtctggcgctccatggagcacccagggaagctactgtttgctcctaacttgctcttggacaggaaccagggaaaatgtgtagagggcatggtggagatcttcgacatgctgctggctacatcatctcggttccgcatgatgaatctgcagggagaggagtttgtgtgcctcaaatctattattttgcttaattctggagtgtacacatttctgtccagcaccctgaagtctctggaagagaaggaccatatccaccgagtcctggacaagatcacagacactttgatccacctgatggccaaggcaggcctgaccctgcagcagcagcaccagcggctggcccagctcctcctcatcctctcccacatcaggcacatgagtaacaaaggcatggagcatctgtacagcatgaagtgcaagaacgtggtgcccctctatgacctgctgctggagatgctggacgcccaccgcctacatgcgcccactagccgtggaggggcatccgtggaggagacggaccaaagccacttggccactgcgggctctacttcatcgcattccttgcaaaagtattacatcacgggggaggcagagggtttccctgccacggtctgagagctccctggctcccacacggttcagataatccctgctgcattttaccctcatcatgcaccactttagccaaattctgtctcctgcatacactccggcatgcatccaacaccaatggctttctagatgagtggccattcatttgcttgctcagttcttagtggcacatcttctgtcttctgttgggaacagccaaagggattccaaggctaaatctttgtaacagctctctttcccccttgctatgttactaagcgtgaggattcccgtagctcttcacagctgaactcagtctatgggttggggctcagataactctgtgcatttaagctacttgtagagacccaggcctggagagtagacattttgcctctgataagcactttttaaatggctctaagaataagccacagcaaagaatttaaagtggctcctttaattggtgacttggagaaagctaggtcaagggtttattatagcaccctcttgtattcctatggcaatgcatccttttatgaaagtggtacaccttaaagcttttatatgactgtagcagagtatctggtgattgtcaattcattccccctataggaatacaaggggcacacagggaaggcagatcccctagttggcaagactattttaacttgatacactgcagattcagatgtgctgaaagctctgcctctggctttccggtcatgggttccagttaattcatgcctcccatggacctatggagagcagcaagttgatcttagttaagtctccctatatgagggataagttcctgatttttgtttttatttttgtgttacaaaagaaagccctccctccctgaacttgcagtaaggtcagcttcaggacctgttccagtgggcactgtacttggatcttcccggcgtgtgtgtgccttacacaggggtgaactgttcactgtggtgatgcatgatgagggtaaatggtagttgaaaggagcaggggccctggtgttgcatttagccctggggcatggagctgaacagtacttgtgcaggattgttgtggctactagagaacaagagggaaagtagggcagaaactggatacagttctgaggcacagccagacttgctcagggtggccctgccacaggctgcagctacctaggaacattccttgcagaccccgcattgccctttgggggtgccctgggatccctggggtagtccagctcttcttcatttcccagcgtggccctggttggaagaagcagctgtcacagctgctgtagacagctgtgttcctacaattggcccagcaccctggggcacgggagaagggtggggaccgttgctgtcactactcaggctgactggggcctggtcagattacgtatgcccttggtggtttagagataatccaaaatcagggtttggtttggggaagaaaatcctcccccttcctcccccgccccgttccctaccgcctccactcctgccagctcatttccttcaatttcctttgaacctataggctaaaaaagaaaggctcattccagccacagggcagccttccctgggcctttgcttctctagcacaattatgggttacttcctttttcttaacaaaaaagaatgtttgatttcctctgggtgaccttattgtctgtaattgaaaccctattgagaggtgatgtctgtgttagccaatgacccaggtgagctgctcgggcttctcttggtatgtcttgtttggaaaagtggatttcattcatttctgattgtccagttaagtgatcaccaaaggactgagaatctgggagggcaaaaaaaaaaaaaaagtttttatgtgcacttaaatttggggacaattttatgtatctgtgttaaggatatgtttaagaacataattcttttgttgctgtttgtttaagaagcaccttagtttgtttaagaagcaccttatatagtataatatatatttttttgaaattacattgcttgtttatcagacaattgaatgtagtaattctgttctggatttaatttgactgggttaacatgcaaaaaccaaggaaaaatatttagtttttttttttttttttgtatacttttcaagctaccttgtcatgtatacagtcatttatgcctaaagcctggtgattattcatttaaatgaagatcacatttcatatcaacttttgtatccacagtagacaaaatagcactaatccagatgcctattgttggatattgaatgacagacaatcttatgtagcaaagattatgcctgaaaaggaaaattattcagggcagctaattttgcttttaccaaaatatcagtagtaatatttttggacagtagctaatgggtcagtgggttctttttaatgtttatacttagattttcttttaaaaaaattaaaataaaacaaaaaaaaatttctaggactagacgatgtaataccagctaaagccaaacaattatacagtggaaggttttacattattcatccaatgtgtttctattcatgttaagatactactacatttgaagtgggcagagaacatcagatgattgaaatgttcgcccaggggtctccagcaactttggaaatctctttgtatttttacttgaagtgccactaatggacagcagatattttctggctgatgttggtattgggtgtaggaacatgatttaaaaaaaaactcttgcctctgctttcccccactctgaggcaagttaaaatgtaaaagatgtgatttatctggggggctcaggtatggtggggaagtggattcaggaatctggggaatggcaaatatattaagaagagtattgaaagtatttggaggaaaatggttaattctgggtgtgcaccagggttcagtagagtccacttctgccctggagaccacaaatcaactagctccatttacagccatttctaaaatggcagcttcagttctagagaagaaagaacaacatcagcagtaaagtccatggaatagctagtggtctgtgtttcttttcgccattgcctagcttgccgtaatgattctataatgccatcatgcagcaattatgagaggctaggtcatccaaagagaagaccctatcaatgtaggttgcaaaatctaacccctaaggaagtgcagtctttgatttgatttccctagtaaccttgcagatatgtttaaccaagccatagcccatgccttttgagggctgaacaaataagggacttactgataatttacttttgatcacattaaggtgttctcaccttgaaatcttatacactgaaatggccattgatttaggccactggcttagagtactccttcccctgcatgacactgattacaaatactttcctattcatactttccaattatgagatggactgtgggtactgggagtgatcactaacaccatagtaatgtctaatattcacaggcagatctgcttggggaagctagttatgtgaaaggcaaatagagtcatacagtagctcaaaaggcaaccataattctctttggtgcaggtcttgggagcgtgatctagattacactgcaccattcccaagttaatcccctgaaaacttactctcaactggagcaaatgaactttggtcccaaatatccatcttttcagtagcgttaattatgctctgtttccaactgcatttcctttccaattgaattaaagtgtggcctcgtttttagtcatttaaaattgttttctaagtaattgctgcctctattatggcacttcaattttgcactgtcttttgagattcaagaaaaatttctattcttttttttgcatccaattgtgcctgaacttttaaaatatgtaaatgctgccatgttccaaacccatcgtcagtgtgtgtgtttagagctgtgcaccctagaaacaacatattgtcccatgagcaggtgcctgagacacagacccctttgcattcacagagaggtcattggttatagagacttgaattaataagtgacattatgccagtttctgttctctcacaggtgataaacaatgctttttgtgcactacatactcttcagtgtagagctcttgttttatgggaaaaggctcaaatgccaaattgtgtttgatggattaatatgcccttttgccgatgcatactattactgatgtgactcggttttgtcgcagctttgctttgtttaatgaaacacacttgtaaacctcttttgcactttgaaaaagaatccagcgggatgctcgagcacctgtaaacaattttctcaacctatttgatgttcaaataaagaattaaact

SEQ ID NO: 884 - DNA, 497 bp, Homo sapiens
ttttttttttttttttaaaaaaaaaaaagaccattatttctttgttttgtttttcctgtataaaaaaggaccccaaatataaaggtagggaaagggacaagagggaacataccccttagtgtatagaaatgggaaggagaaggagaagcctcaaaaggagaggtgggaggggaatgtcattaaggcagcaaagtaatctctgtagaaagatggaggaggaccctccatagcctcagagataaaggcaaagattgccctctcagtgtccagaagggaaatggcagcttttcttccttccatggcagccactccattgctcactccggattaccttcatccttatgtagataagagtgctgcagagctcgaaaggcagagattcgcttgtgtgggttaaaagtcagcatttccagcagcagctgtgctcccgactcctccatctcaggtaccaccgactgcactgggcggggccccttggggggaaaggctccacgggc

SEQ ID NO: 885 - DNA, 295 bp, Homo sapiens
ggtgtcggtgcctatgggacagtgtacaaggcccgtgatccccacagtggccactttgcggtcaagagtgtgagagtcccaatggaggaggaggtggaggaggccttcccatcagcacagttcgtgaggtggctttactgaggcgactggaggcttttgagcatcccaatgttgtccggctgatggacgtctgtgccacatcccgaactgaccgggagatcaaggtaaccctggtgtttgagcatgtagaccaggacctaaggacatatctggacaaggcacccccaccaggctt

SEQ ID NO: 886 - DNA, 1474 bp, Homo sapiens
agccctcccagtttccgcgcgcctctttggcagctggtcacatggtgagggtgggggtgagggggcctctctagcttgcggcctgtgtctatggtcgggccctctgcgtccagctgctccggaccgagctcgggtgtatggggccgtaggaaccggctccggggccccgataacgggccgcccccacagcaccccgggctggcgtgagggtctcccttgatctgagaatggctacctctcgatatgagccagtggctgaaattggtgtcggtgcctatgggacagtgtacaaggcccgtgatccccacagtggccactttgtggccctcaagagtgtgagagtccccaatggaggaggaggtggaggaggccttcccatcagcacagttcgtgaggtggctttactgaggcgactggaggcttttgagcatcccaatgttgtccggctgatggacgtctgtgccacatcccgaactgaccgggagatcaaggtaaccctggtgtttgagcatgtagaccaggacctaaggacatatctggacaaggcacccccaccaggcttgccagccgaaacgatcaaggatctgatgcgccagtttctaagaggcctagatttccttcatgccaattgcatcgttcaccgagatctgaagccagagaacattctggtgacaagtggtggaacagtcaagctggctgactttggcctggccagaatctacagctaccagatggcacttacacccgtggttgttacactctggtaccgagctcccgaagttcttctgcagtccacatatgcaacacctgtggacatgtggagtgttggctgtatctttgcagagatgtttcgtcgaaagcctctcttctgtggaaactctgaagccgaccagttgggcaaaatctttgacctgattgggctgcctccagaggatgactggcctcgagatgtatccctgccccgtggagcctttccccccagagggccccgcccagtgcagtcggtggtacctgagatggaggagtcgggagcacagctgctgctggaaatgctgacttttaacccacacaagcgaatctctgcctttcgagctctgcagcactcttatctacataaggatgaaggtaatccggagtgagcaatggagtggctgccatggaaggaagaaaagctgccatttcccttctggacactgagagggcaatctttgcctttatctctgaggctatggagggtcctcctccatctttctacagagattactttgctgccttaatgacattcccctcccacctctccttttgaggcttctccttctccttcccatttctctacactaaggggtatgttccctcttgtccctttccctacctttatatttggggtccttttttatacaggaaaaacaaaacaaagaaataatggtcttttttttttttttaaaaaaaaaaaaaaaaaaaaaaaaaaaaaaaa

SEQ ID NO: 887 - DNA, 428 bp, Homo sapiens
  modified_base (37)..(37): a, c, t or g
  modified_base (40)..(40): a, c, t or g
  modified_base (114)..(114): a, c, t or g
  modified_base (142)..(142): a, c, t or g
  modified_base (222)..(222): a, c, t or g
  modified_base (330)..(330): a, c, t or g
  modified_base (369)..(369): a, c, t or g
  modified_base (391)..(391): a, c, t or g
  modified_base (419)..(419): a, c, t or g
gtggctgaggctttattttgatcaggtaggcctaagnagngggcattgctgcaggagcagggcctgtaaaccagtcaatgctgtcatgcaacacggggacagctcagggctganctccacaggcgaggggccaggtaggctntcaaagcagatacaaccactaacaggaaggaaggtcaggctggctttagtgcagggaagggtagttttgggagggggatnttcatgaaggaaagtgggtagctgaggcttcaaagggcctgcatgggacaggggtttaggggaagtgaagaggcccaattaaagtctttggggggtaaagatgggganttaaacagggagaaaggaaccgagggaggcaggttcttngggattgcagagtcccaacttncgctttcacaaccttgggcagcagcttnagtattggc

SEQ ID NO: 888 - DNA, 400 bp, Homo sapiens
  modified_base (205)..(205): a, c, t or g
  modified_base (210)..(210): a, c, t or g
  modified_base (300)..(300): a, c, t or g
  modified_base (338)..(338): a, c, t or g
  modified_base (356)..(356): a, c, t or g
  modified_base (374)..(374): a, c, t or g
  modified_base (389)..(389): a, c, t or g
  modified_base (394)..(394): a, c, t or g
cttggacgccttcccaaatctgaaggacttcatctcccgctttgagggcttggagaagatctctgcctacatgaagtccagccgcttcctcccaagacctgtgttcacaaagatggctgtctggggcaacaagtagggccttgaaggcagggaggtgggagtgaggagcccatactcagcctgctgcccaggctgtgcagcgcantggancttcttgcatcccagcacctgcctcctcgttcctttctcctgtttattcccatctttacccccaagatttattggggcctctttcacttnccctaaaccctgtcccatggcagggcccttttgaagcntcagttacccatttttcnttcatgaacatccccttnccaacattacctttncttgnattaat

SEQ ID NO: 889 - DNA, 1161 bp, Homo sapiens
ctctgagccctgctcggtttaggcctgtctgcggaatccgcaccaaccagcaccatgcccatgatactggggtactgggacatccgcgggctggcccacgccatccgcctgctcctggaatacacagactcaagctatgaggaaaagaagtacacgatgggggacgctcctgattatgacagaagccagtggctgaatgaaaaattcaagctgggcctggactttcccaatctgccctacttgattgatggggctcacaagatcacccagagcaacgccatcttgtgctacattgcccgcaagcacaacctgtgtggggagacagaagaggagaagattcgtgtggacattttggagaaccagaccatggacaaccatatgcagctgggcatgatctgctacaatccagaatttgagaaactgaagccaaagtacttggaggaactccctgaaaagctaaagctctactcagagtttctggggaagcggccatggtttgcaggaaacaagatcacttttgtagattttctcgtctatgatgtccttgacctccaccgtatatttgagcccaagtgcttggacgccttcccaaatctgaaggacttcatctcccgctttgagggcttggagaagatctctgcctacatgaagtccagccgcttcctcccaagacctgtgttctcaaagatggctgtctggggcaacaagtagggccttgaaggccaggaggtgggagtgaggagcccatactcagcctgctgcccaggctgtgcagcgcagctggactctgcatcccagcacctgcctcctcgttcctttctcctgtttattcccatctttactcccaagacttcattgtccctcttcactccccctaaacccctgtcccatgcaggccctttgaagcctcagctacccactatccttcgtgaacatcccctcccatcattacccttccctgcactaaagccagcctgaccttccttcctgttagtggttgtgtctgctttaaagggcctgcctggcccctcgcctgtggagctcagccccgagctgtccccgtgttgcatgaaggagcagcattgactggtttacaggccctgctcctgcagcatggtccctgccttaggcctacctgatggaagtaaagcctcaaccaca

SEQ ID NO: 890 - DNA, 383 bp, Homo sapiens
gtttcgttgtttaagattttaataaaggtggggcaaagggttgaattggtcgaaaagtcctcaacgtcctgacgggactcccctgaagccaaggcagtttgagtccattcattattctgtcttggatcttaggcaaagccccgggccccttggagcagcaccagggttcccgacacccccaccgacagggtcgaacgtgcacaggctgggaccacgccggagttcattgagccctcgtgggggagggcagttccagggaccaggaagggattcccgtccagtgtcaggttatccacctcgggcagctcgtcaggctgcggcgccctgttcagtctgttgcagctgagatcgagcactctgagcttggctggcagtcctttagg

SEQ ID NO: 891 - DNA, 409 bp, Homo sapiens
ctgacacggtcaaggctctccgcgtgcgcggctcacagtgggagccacaggttcctgctcagctactggtaggcgccctgcgtgtgctagcgtactcccgcctcaaggaactgacgctcgaggacctaaagataaccggcaccatgcctccgctgcctctggaagccacaggacttgcactttccagcttgcgcctacgcaacgtgtcgtgggcgacagggcgttcttggctcgccgagctgcagcagtggctcaagccaggcctcaaggtactgagcattgcccaagcacactcgcctgccttttcctgcgaacaggttcgcgccttcccggcccttaccagcctagacctgtctgacaatcctggactgggcgaacgcggactgatggcggctctctgtccccacaa

SEQ ID NO: 892 - DNA, 379 bp, Homo sapiens
gggaacgtgaattttaatgagggggcagaccgaggaggtggtggctgcccggagatcagggccaggctgtgctagatggcgcctggaaggggggtcacccaagtctccctgctgtcatttcaggaggccgacccaagtctccctgctgtcatttcaggaggccgaattttttcccaatcccagagaaggtgtcagaggcctggttagcagtcttgtcgatggtttcctgggtggtcttggccagctggtccatggctttctgccccgcctctgtggcctggtccaccacttgctgagctgccgctccggccgctgacacggcttcctgggcggtcccctccacctgttgcttcaggtcctgcaagcacttgcttgccat

SEQ ID NO: 893 - DNA, 672 bp, Homo sapiens
caggccagccctggggcgccttaaaaaccggagctggcgcttggcatcgccactctgggcaggatccaacgtcgctccagctgctcttgacgactccacagataccccgaagccatggcaagcaagggcttgcaggacctgaagcaacaggtggaggggaccgcccaggaagccgtgtcagcggccggagcggcagctcagcaagtggtggaccaggccacagaggcggggcagaaagccatggaccagctggccaagaccacccaggaaaccatcgacaagactgctaaccaggcctctgacaccttctctgggattgggaaaaaattcggcctcctgaaatgacagcagggagacttgggtcggcctcctgaaatgacagcagggagacttgggtgaccccccttccaggcgccatctagcacagcctggccctgatctccgggcagccaccacctcctcggtctgccccctcattaaaattcacgttcccaccctgtgtccacttcatgattcctcgcaagctgggcccagtcctctcatcccaagagcagagccaccgtagccggagtcctagcctcccaaattcggaaatccaatccaacggtctcaggaatgttttccatcccgccacgcgcctcccgaagctcccagaccggaggctcagccccc

SEQ ID NO: 894 - DNA, 516 bp, Homo sapiens
tttaaagtcaaccttggagtctctttatctgaaaattattttcaggcctttggaacggtgttgattgtctcatatattacctctgttacagaggaaagtcatgcagtcttctccttctcaaaaaaaagaaaaatatttaaagcaacacacacatactgttcagagacagcaaagtccagacagcatcgcagaatccattggatctagtcatggctctggagagtccccggtatcatcccccctggctgagcaggaaagactgacagaaacactgggtgcaggagctcagccgagtccctcctcaaggccccggatcctccgggccagttgcacatcctttgggaagagagtaactcggcctgcatgtaaggtgaggagataggcgtcctcaaagagatgaactagaaatgcttctgctgcctcttgtagggccaataggggctgggctttgcaattgaagttcccaccacgagtgaatttaacacatatttctcttgtcaggcggctgaaggggag

SEQ ID NO: 895 - DNA, 440 bp, Homo sapiens
ggagacaaggttggctaaaggagatccgaaagcttcagaagagcacacacctcttgataaggaagctgcccttcagccgcctggcaagagaaatatgtgttaaattcactcgtggtgtggacttcaattggcaagcccaggccctattggccctacaagaggcagcagaagcatttctagttcatctctttgaggacgcctatctcctcaccttacatgcaggccgagttactctcttcccaaaggatgtgcaactggcccggaggatccggggccttgaggagggactcggctgagctcctgcacccagtgtttctgtcagtctttcctgctcagccaggggggatgataccggggactctccagagccatgactagatccaatggattctgcgatgctgtctggactttgctgtctctgaacagtatgtgtgtgttgc

SEQ ID NO: 896 - DNA, 1389 bp, Homo sapiens
cgcggacttctgccaagcaccggctcatgtgaggctcgcggcacagcgttctctgggctccccagaagccagcctttcgctcccggacccggcagcccgagcaggagccgtgggaccgggcgccagcaccctctgcggcgtgtcatgggcccgcgccgccggagccgaaagcccgaggccccgaggaggcgcagcccgagcccgaccccgacccccggcccctcccggcggggcccctccttaggcgcttcctcccatcaacacagtcggcggagacaaggttggctaaaggagatccgaaagcttcagaagagcacacacctcttgataaggaagctgcccttcagccgcctggcaagagaaatatgtgttaaattcactcgtggtgtggacttcaattggcaagcccaggccctattggccctacaagaggcagcagaagcatttctagttcatctctttgaggacgcctatctcctcaccttacatgcaggccgagttactctcttcccaaaggatgtgcaactggcccggaggatccggggccttgaggagggactcggctgagctcctgcacccagtgtttctgtcagtctttcctgctcagccaggggggatgataccggggactctccagagccatgactagatccaatggattctgcgatgctgtctggactttgctgtctctgaacagtatgtgtgtgttgctttaaatatttttcttttttttgagaaggagaagactgcatgactttcctctgtaacagaggtaatatatgagacaatcaacaccgttccaaaggcctgaaaataattttcagataaagagactccaaggttgactttagtttgtgagttactcatgtgactatttgaggattttgaaaacatcagatttgctgtggtatgggagaaaaggttatgtacttattattttagctctttctgtaatatttacattttttaccatatgtacatttgtacttttattttacacataagggaaaaaataagaccactttgagcagttgcctggaaggctgggcatttccatcatatagacctctgcccttcagagtagcctcaccattagtggcagcatcatgtaactgagtggactgtgcttgtcaacggatgtgtagcttttcagaaacttaattggggatgaatagaaaacctgtaagctttgatgttctggttacttctagtaaattcctgtcaaaatcaattcagaaattctaacttggagaatttaacattttactcttgtaaatcatagaagatgtatcataacagttcagaattttaaagtacattttcgatgcttttatgggtatttttgtagtttctttgtagagagataataaaaatcaaaatatttaatga

SEQ ID NO: 897 - DNA, 478 bp, Homo sapiens
ttttgtagaaagaatttattagaggaattggcttacatgattacagaggaagagaagccccgcaatagaccatttgcaagctggagaaccaaagaaaccattagtgtggctcagtctagaaacctcagaatgagggaagtcaatggtgcaacctccaagttagaggcagaaggcctgagagcacctggaaggcctccggttcaagtcccagagtccaaaagttgaagaacctggagtctggtatccaggggcagtagaagaaaagatgtcccgctctggagaggagagagcaaaaagggaggatccctcttcttccccgttttcccagccagtacccagcccatgggaggtgcctgcccacaaagagtgagtcttcctctctcagttcactgactcaaggtcattctctcctgggaacatactcacagacacaaccagaaatgatgcttcaccagccatctaggcatccctcacccag

SEQ ID NO: 898 - DNA, 507 bp, Homo sapiens
cgcggctcagtatgaatgcggctgttaagacctgcaataatccagaatggtactctgatctatgttgataaggaaaatggagaaccaggcacccgtgtggttgctaaggatgggctgaagctggggtctggaccttcaatcaaagccttagatgggagatctcaagtttcaacaccacgttttggcaaaacgttcgatgccccaccagccttacctaaagctactagaaaggctttgggaactgtcaacagagctacagaaaagtctgtaaagaccaagggacccctcaaacaaaaacagccaagcttttctgccaaaaagatgactgagaagactgttaaagcaaaaagctctgttcctgcctcagatgatgcctatccagaaatagaaaaattctttcccttcaatcctctagactttgagagttttgacctgcctgaagagcaccagattgcgcactcccttgagtggagtgcctctcatgatccttgacgaggagagagagct

SEQ ID NO: 899 - DNA, 728 bp, Homo sapiens
gcggcctcagatgaatgcggctgttaagacctgcaataatccagaatggctactctgatctatgttgataaggaaaatggagaaccaggcacccgtgtggttgctaaggatgggctgaagctggggtctggaccttcaatcaaagccttagatgggagatctcaagtttcaacaccacgttttggcaaaacgttcgatgccccaccagccttacctaaagctactagaaaggctttgggaactgtcaacagagctacagaaaagtctgtaaagaccaagggacccctcaaacaaaaacagccaagcttttctgccaaaaagatgactgagaagactgttaaagcaaaaagctctgttcctgcctcagatgatgcctatccagaaatagaaaaattctttcccttcaatcctctagactttgagagttttgacctgcctgaagagcaccagattgcgcacctccccttgagtggagtgcctctcatgatccttgacgaggagagagagcttgaaaagctgtttcagctgggccccccttcacctgtgaagatgccctctccaccatgggaatccaatctgttgcagtctccttcaagcattctgtcgaccctggatgttgaattgccacctgtttgctgtgacatagatatttaaatttcttagtgcttcagagtttgtgtgtatttgtattaataaagcattcttcaacagaaaaaaaaaaaaaaaaa

SEQ ID NO: 900 - DNA, 403 bp, Homo sapiens
tttgaatattcacatctgtttaatgtgcataaagccaaggaaaggacagttccgaattcaatagaaatattctgtacaattcatatggtggggttgacggggagggggacaaggctgtagaacccacacccgaacatgtacaaaaataacttatacagcaacccccacctgcaaggatgatgcagctctgcccagccaccggggctggggggcacactgcagacatggcaccgcgggagccaaccagtatgggccccagatgcaggtgggagtgaggagggcaccagtccggaggggagggcagctattaggaggccttgagacggttgctggccgagcgtgacgtcagcagcttgtccaccatagtgcgggcgtacggaccggctggccagctccttgcagc

SEQ ID NO: 901 - DNA, 2204 bp, Homo sapiens
gagcggtgcggaggctctgctcggatcgaggtctgcagcgcagcttcgggagcatgagtgctgcagtgactgcagggaagctggcacgggcaccggccgaccctgggaaagccggggtccccggagttgcagctcccggagctccggcggcggctccaccggcgaaagagatcccggaggtcctagtggacccacgcagccggcggcgctatgtgcggggccgctttttgggcaagggcggctttgccaagtgcttcgagatctcggacgcggacaccaaggaggtgttcgcgggcaagattgtgcctaagtctctgctgctcaagccgcaccagagggagaagatgtccatggaaatatccattcaccgcagcctcgcccaccagcacgtcgtaggattccacggctttttcgaggacaacgacttcgtgttcgtggtgttggagctctgccgccggaggtctctcctggagctgcacaagaggaggaaagccctgactgagcctgaggcccgatactacctacggcaaattgtgcttggctgccagtacctgcaccgaaaccgagttattcatcgagacctcaagctgggcaaccttttcctgaatgaagatctggaggtgaaaataggggattttggactggcaaccaaagtcgaatatgacggggagaggaagaagaccctgtgtgggactcctaattacatagctcccgaggtgctgagcaagaaagggcacagtttcgaggtggatgtgtggtccattgggtgtatcatgtataccttgttagtgggcaaaccaccttttgagacttcttgcctaaaagagacctacctccggatcaagaagaatgaatacagtattcccaagcacatcaaccccgtggccgcctccctcatccagaagatgcttcagacagatcccactgcccgcccaaccattaacgagctgcttaatgacgagttctttacttctggctatatccctgcccgtctccccatcacctgcctgaccattccaccaaggttttcgattgctcccagcagcctggaccccagcaaccggaagcccctcacagtcctcaataaaggcttggagaaccccctgcctgagcgtccccgggaaaaagaagaaccagtggttcgagagacaggtgaggtggtcgactgccacctcagtgacatgctgcagcagctgcacagtgtcaatgcctccaagccctcggagcgtgggctggtcaggcaagaggaggctgaggatcctgcctgcatccccatcttctgggtcagcaagtgggtggactattcggacaagtacggccttgggtatcagctctgtgataacagcgtgggggtgctcttcaatgactcaacacgcctcatcctctacaatgatggtgacagcctgcagtacatagagcgtgacggcactgagtcctacctcaccgtgagttcccatcccaactccttgatgaagaagatcaccctccttaaatatttccgcaattacatgagcgagcacttgctgaaggcaggtgccaacatcacgccgcgcgaaggtgatgagctcgcccggctgccctacctacggacctggttccgcacccgcagcgccatcatcctgcacctcagcaacggcagcgtgcagatcaacttcttccaggatcacaccaagctcatcttgtgcccactgatggcagccgtgacctacatcgacgagaagcgggacttccgcacataccgcctgagtctcctggaggagtacggctgctgcaaggagctggccagccggctccgctacgcccgcactatggtggacaagctgctgagctcacgctcggccagcaaccgtctcaaggcctcctaatagctgccctcccctccggactggtgccctcctcactcccacctgcatctggggcccatactggttggctcccgcggtgccatgtctgcagtgtgccccccagccccggtggctgggcagagctgcatcatccttgcaggtgggggttgctgtgtaagttatttttgtacatgttcgggtgtgggttctacagccttgtccccctccccctcaaccccaccatatgaattgtacagaatatttctattgaattcggaactgtcctttccttggctttatgcacattaaacagatgtgaatattcaaaaaaaaaaaaaaaaaaaaaaaaaaaaaaaaaaa

SEQ ID NO: 902 - DNA, 339 bp, Homo sapiens
tttggtggggagatgcagtttgtttatttttaatcaaatgtgagtgaacaaagcagtcgcccatctacttcccgttggaaggaatgcagggcagtaataaattagacggccccaccctcccagggcacagggggactttggtttctgcttctctagaggtacatggggaacaagcgtggcttctgccagacttgtttagctgtgacctgcagggcaggcccctggggtgccagcttagttcaccagatggaaggtcagcatggctgtgcacgcttgtctgagagggtcctggcagtgggtacgcagggtgtatggcagggctcttttccagtgcttgct

SEQ ID NO: 903 - DNA, 3997 bp, Homo sapiens
ggcgacgccgacgcgagtctggcggctgctgcttgcgactgcggaggccgggcgaggccggtgaggacgcggcgggcgagcgagaggccgaggtgttttcttcactcatggtgaagaatgggggagatagaaggaacatacagagtcctgcagactgcagggatgcgcttgggtgcccagacccctgtgggagttagcacccttgagcctgggcagactctcttgcccagaatgcaagagaagcacctgcacctcagagtaaagctgctggacaacaccatggaaatatttgacattgagcctaaatgcgatggccaggtattactgacacaagtgtggaagcgtttaaacctggtagaatgtgactacttcgggatggagtttcaaaatactcagtcctactggatttggcttgaacctatgaaacccatcattaggcaaatacgaaggccaaagaatgtggtgcttcgcctagctgtaaaattttttccacctgatcctggtcagctacaagaagaatatacaagatacttgtttgccttgcaacttaagagagacctgctggaagagcgtttgacctgtgctgacaccacagcggcccttctcacgtcccatctcctgcagtcggaaataggagattacgatgaaacgctggaccgagagcacctcaaagtgaacgagtatttgcctggccagcagcactgccttgagaagatactagaattccatcagaagcacgtgggccagacacctgctgagtcggatttccaggtgctcgaaattgctcgaaagttggaaatgtacggcatcagatttcacatggcttctgacagggaaggaaccaagattcaactggcagtttcccacatgggtgtactcgtgttccagggcaccaccaaaatcaacactttcaactggtccaaggtccgtaaactaagcttcaagaggaaaagatttcttatcaaacttcatccagaggttcatggaccttaccaggacacattagaatttttgttgggtagtagagatgaatgtaagaacttctggaagatttgtgtggagtatcacaccttttttagacttttggaccaacctaagccaaaagcaaaagccgtcttcttcagccggggctcctccttcagatacagtggaagaactcagaaacaactagtagattatttcaaagacagtggaatgaagagaattccatatgaaagaaggcacagcaagacccacacgtccgttcgagctctgactgcagacctaccaaaacagagcatctcattccccgagggattgaggactcctgcctccccatcttcagcgaatgccttttactcgctctctccctccactctggtcccctctggcctgccagagtttaaggacagcagcagctccctcacagatccccaggtttcctacgtcaagagtccagctgcagagaggcgcagtggagcagtggctggaggccccgacacaccatcggcccagcccctcgggccccccgcactccagcctggtccaggcctttccacgaagagtcctcagccttctccctccagccggaagagccccctgagtctgagccctgcatttcaggtgcctttgggcccagctgaacagggctcatccccactcctgagccctgtcctcagtgatgctggcggagccgggatggactgcgaggagcccagacacaagcgcgtgcctgcagacgaggcctacttcatagtcaaagagattctcgctacagaacgaacatacctcaaggatttagaagttattaccgtgtggttccgcagcgcagtggtgaaggaggacgccatgcctgcgactctgatgacgctgctcttctccaacatcgatcccatctatgagttccacagaggcttcctgcgcgaggtggagcagaggctggcactctgggaagggccctccaaagcccacacaaaaggcagtcatcaacgaatcggggacatcctgctcaggaacatgcgccagttaaaggagtttaccagctacttccaaagacatgacgaggtcctaacagaactggaaaaggctaccaaacgctgtaagaagttggaggcagtgtacaaggagtttgagctgcagaaggtctgctacttgcctctcaacacgttcctgctgaagcccatccagcggctgctgcactaccgcctgctgctgcgccgcctatgcggacattacagccccgggcaccatgactacgctgactgccatgacgccctgaaagccatcacagaggtgaccaccacactacagcacattctcatccggctggagaacctgcagaagctaacggagctgcagcgggacctggtgggcatagagaacctcattgctcctggcagggagttcatccgtgagggctgccttcacaagctcaccaagaagggcctgcagcagaggatgttttttctgttctcagatatgttgctgtacacaagcaaaggagttgcagggaccagccacttccggatccggggcctccttcccctccaaggcatgctggtggaagaaagtgataacgagtggtctgttccacactgtttcaccatctacgcggctcagaaaacaatcgtggtggcagccagcactcggctggagaaagagaagtggatgctggacctgaactccgcgatccaagcagccaagagtggcggtgacacggcccctgcactgccaggccgcactgtgtgcactcgtccccccagatcccccaacgaggtatctctggagcaggagtcagaagatgatgctcggggtgtccgcagctccctggaggggcatggccagcaccgggccaacaccacaatgcacgtgtgctggtaccggaacaccagcgtgtccagggcagaccacagtgcagctgtcgagaaccagctttcaggatatctgctaagaaagttcaaaaacagtcatggctggcagaagctctgggtcgtctttaccaacttctgtttgttcttctacaaaactcatcaggatgactacccactggccagcctcccgctgctgggctacagcgtgagcatccccagggaggccgatggcatacacaaagactatgttttcaagctccagttcaaatcccacgtctacttcttccgggctgagagcaagtacacatttgaaaggtggatggaggtgatccagggggccagcagctcagccgggagggccccaagcatcgtgcaggatggcccccaaccctcctcagggctggaggggatggtcagggggaaggaggaatgacgctcaacctgcccaggtttggacacaactacaaagaacagcaggacacagaggtgacctctgtcctgaggcttctcaacagatgggaagtggctgtggtctcactggatccccactggcaccagcagtgtgggtgggcctcatgtaacatctgggaggggcttcatccccccacccaggacctagtgcatgccagcagctatctggggccctgggaaaaatgtgcgagtcttgagcgcggagccgctcaagccacagctcccaggcccctggctcaaagacgcagacaaggcctgagcagtgctctcggcatcggaccaaagcctgggcacaccctgcctctctccccagagcagggtccctgccgaggactggcctagagcaagcactggaaaagaggccctgccatacaccctgcgtacccactgccaggaccctctcagacaagcgtggcacagccatgctgaccttccatctggtgaaccaagtggcagccccaggggcctgccctgcaggtcacagctaaacaagtctggcagaagccacgcttgttccccatgtacctctagagaagcagaaaccaaagtccccctgtgccctgggagggtggggccgtctaatttattactgcccagcattccttccaacgggaagtagatgggcgactgctttgttcacacacatttgattaaaaataaacaaacagcatctcccc

SEQ ID NO: 904 - DNA, 534 bp, Homo sapiens
tttttttttttttttttttttttaggatgattgagtgtttctttaaaaataaaaaccccacaaaaaagccagaacaccctacccaacccagcccagtgtaacaggttagccattaacacagaataaagaaggtcccagccacacacgtcattactcggcagagggtgtccagcctggtcggccgacgtcacagtggatggccctgcgtggctgggacacagacagggagcaggcatggcacctgcgccacgcagagcagcaaggctgagcatgaccactggaaataaataaacatggtgccgacagcatctttaaattagtaagacgttagcacaaaacaaaaaagcacaacgactgaaaatgcacttgcttgttgtggtgggttgtgcttgaaacacctgaagccccaagtgggaaccgctggggacgtttgtcagtggaatttggagaaaaaggacggaaaaatcagttttctgagaaagtccctgcggtggccctggtcctgtgaattcagcacagcagatggggaggggg

SEQ ID NO: 905 - DNA, 500 bp, Homo sapiens
agctggggtgggagctcctccgcagaaggttggtggggggtccagtctgtgatccttggtgctgtgtgccccactccagcctggggaccccacttcagaaggtaggggccgtgtcccgcggtgctgactgaggcctgcttccccctccccctcctgctgtgctggaattccacagggaccagggccaccgcagggtactgtctcagaagacttgatttttccgtccctttttctccacactccactgacaaacgtccccagcggtttcacttgtggcttcaggtgttttcaagcacaacccaccacaacaagcaagtgcattttcagtcgttgtgcttttttgttttgtgctaacgtcttactaatttaaagatgctgtcggcaccatgtttatttatttccagtggtcatgctcagccttgctgctctgcgtggcgcagtgccatgcctgctccctgtctgtgtccagccagagggccatccactgtgacgtcgccgac

SEQ ID NO: 906 - DNA, 4583 bp, Homo sapiens
ggacgcgtgggtcgacccacgcgtccggcgggcggcgcgcacactgctcgctgggccgcggctcccgggtgtcccaggcccggccggtgcgcagagcatggcgggtgcgggcccgaagcggcgcgcgctagcggcgccggcggccgaggagaaggaagaggcgcgggagaagatgctggccgccaagagcgcggacggctcggcgccggcaggcgagggcgagggcgtgaccctgcagcggaacatcacgctgctcaacggcgtggccatcatcgtggggaccattatcggctcgggcatcttcgtgacgcccacgggcgtgctcaaggaggcaggctcgccggggctggcgctggtggtgtgggccgcgtgcggcgtcttctccatcgtgggcgcgctctgctacgcggagctcggcaccaccatctccaaatcgggcggagactacgcctacatgctggaggtctacggctcgctgcccgccttcctcaagctctggatcgagctgctcatcatccggccttcatcgcagtacatcgtggccctggtcttcgccacctacctgctcaagccgctcttccccacctgcccggtgcccgaggaggcagccaagctcgtggcctgcctctgcgtgctgctgctcacggccgtgaactgctacagcgtgaaggccgccacccgggtccaggatgcctttgccgccgccaagctcctggccctggccctgatcatcctgctgggcttcgtccagatcgggaagggtgttgtgtccaatctagatcccaacttctcatttgaaggcaccaaactggatgtggggaacattgtgctggcattatacagcggcctctttgcctatggaggatggaattacttgaatttcgtcacagaggaaatgatcaacccctacagaaacctgcccctggccatcatcatctccctgcccatcgtgacgctggtgtacgtgctgaccaacctggcctacttcaccaccctgtccaccgagcagatgctgtcgtccgaggccgtggccgtggacttcgggaactatcacctgggcgtcatgtcctggatcatccccgtcttcgtgggcctgtcctgcttcggctccgtcaatgggtccctgttcacatcctccaggctcttcttcgtggggtcccgggaaggccacctgccctccatcctctccatgatccacccacagctcctcacccccgtgccgtccctcgtgttcacgtgtgtgatgacgctgctctacgccttctccaaggacatcttctccgtcatcaacttcttcagcttcttcaactggctctgcgtggccctggccatcatcggcatgatctggctgcgccacagaaagcctgagcttgagcggcccatcaaggtgaacctggccctgcctgtgttcttcatcctggcctgcctcttcctgatcgccgtctccttctggaagacacccgtggagtgtggcatcggcttcaccatcatcctcagcgggctgcccgtctacttcttcggggtctggtggaaaaacaagcccaagtggctcctccagggcatcttctccacgaccgtcctgtgtcagaagctcatgcaggtggtcccccaggagacatagccaggaggccgagtggctgccggaggagcatgcgcagaggccagttaaagtagatcacctcctcgaacccactccggttccccgcaacccacagctcagctgcccatcccagtccctcgccgtccctcccaggtcgggcagtggaggctgctgtgaaaactctggtacgaatctcatccctcaactgagggccagggacaggtgtgcctgtgctcctgcccaggagcagcttttggtctccttgggccctttttcccttccctcctttgtttacttatatatatatattttttaaacttaaattttgggtcaacttgacaccactaagatgattttttaaggagctgggggaaggcaggagccttcctttctcctgccccaagggcccagaccctgggcaaacagagctactgagacttggaacctcattgctaccacagacttgcactgaagccggacagctgcccagacacatgggcttgtgacattcgtgaaaaccaaccctgtgggcttatgtctctgccttagggtttgcagagtggaaactcagccgtagggtggcactgggagggggtgggggatctgggcaaggtgggtgattcctcccaggaggtgcttgaggccccgatggactcctgaccataatcctagccccgagacaccatcctgagccagggaacagccccagggttggggggtgccggcatctcccctagctcaccaggcctggcctctgggcagtgtggcctcttggctatttctgtgtccagttttggaggctgagttctggttcatgcagacaaagccctgtccttcagtcttctagaaacagagacaagaaaggcagacacaccgcggccaggcacccatgtgggcgcccaacctgggctccacacagcagtgtcccctgccccagaggtcgcagctaccctcagcctccaatgcattggcctctgtaccgcccggcagccccttctggccggtgctgggttcccactcccggcctaggcacctccccgctctccctgtcacgctcatgtcctgtcctggtcctgatgcccgttgtctaggagacagagccaagcactgctcacgtctctgccgcctgcgtttggaggcccctgggctctcacccagtccccacccgcctgcagagagggaactagggcaccccttgtttctgttgttcccgtgaatttttttcgctatgggaggcagccgaggcctggccaatgcggcccactttcctgagctgtcgctgcctccatggcagcagccaaggacccccagaacaagaagacccccccgcaggatccctcctgagctcggggggctctgccttctcaggccccgggcttcccttctccccagccagaggtggagccaagtggtccagcgtcactccagtgctcagctgtggctggaggagctggcctgtggcacagccctgagtgtcccaagccgggagccaacgaagccggacacggcttcactgaccagcggctgctcaagccgcaagctctcagcaagtgcccagtggagcctgccgcccccacctgggcaccgggaccccctcaccatccagtgggcccggagaaacctgatgaacagtttggggactcaggaccagatgtccgtctctcttgcttgaggaatgaagacctttattcacccctgccccgttgcttcccgctgcacatggacagacttcacagcgtctgctcataggacctgcatccttcctggggacgaattccactcgtccaagggacagcccacggtctggaggccgaggaccaccagcaggcaggtggactgactgtgttgggcaagacctcttccctctgggcctgttctcttggctgcaaataaggacagcagctggtgccccacctgcctggtgcattgctgtgtgaatccaggaggcagtggacatcgtaggcagccacggccccgggtccaggagaagtgctccctggaggcacgcaccactgcttcccactggggccggcggggcccacgcacgacgtcagcctcttaccttcccgcctcggctaggggtcctcgggatgccgttctgttccaacctcctgctctgggaggtggacatgcctcaaggatacagggagccggcggcctctcgacggcacgcacttgcctgttggctgctgcggctgtgggcgagcatgggggctgccagcgtctgttgtggaaagtagctgctagtgaaatggctggggccgctggggtccgtcttcacactgcgcaggtctcttctgggcgtctgagctggggtgggagctcctccgcagaaggttggtggggggtccagtctgtgatccttggtgctgtgtgccccactccagcctggggaccccacttcagaaggtaggggccgtgtcccgcggtgctgactgaggcctgcttccccctccccctcctgctgtgctggaattccacagggaccagggccaccgcaggggactgtctcagaagacttgatttttccgtccctttttctccacactccactgacaaacgtccccagcggtttccacttgtgggcttcaggtgttttcaagcacaacccaccacaacaagcaagtgcattttcagtcgttgtgcttttttgttttgtgctaacgtcttactaatttaaagatgctgtcggcaccatgtttatttatttccagtggtcatgctcagccttgctgctctgcgtggcgcaggtgccatgcctgctccctgtctgtgtcccagccacgcagggccatccactgtgacgtcggccgaccaggctggacaccctctgccgagtaatgacgtgtgtggctgggaccttctttattctgtgttaatggctaacctgttacactgggctgggttgggtagggtgttctggcttttttgtggggtttttatttttaaagaaacactcaatcatcctaaaaaaaaaaaaaaa

SEQ ID NO: 907 - DNA, 535 bp, Homo sapiens
ttttttttttttttttttttttttttttttatttcatctttaaaaaaacaaaacaaaaaaagtaaaaactaaacagaaaagcactctgtacaaagcctggatactgacaccattgctgttccttcctcatggggggcagtactaggtttcagggacagtctctgaatgggtcgcttttgttcttagacactcccttagggccgcttcccctctcaggccagcttccctaaggctttcagtacccaggatctggaaggaaagggccaagctgggctgtggcatccactggaccctagagtctcattgggcagggctcagaatccacaaagactccccagtgctgttcctcttccaacgaggctggaccccttccagccatctgggaactcaagcaggaaagaaggttccttaggacaggttcctggcatggcaggttcccctggaaattgtcggagggcccccccaactcttgatgccaacagaagtcaggcctttcctggtccctgaggacacataagggttcttgggatttggc

SEQ ID NO: 908 - DNA, 544 bp, Homo sapiens
agagtacctgggtctggacgtgccagtgtgaaccagaaggccaagtccgcagaagccctgatgtgtcctcagggagccgggaaggcctgacttctgctggcatcaagaggtgggagggccctccgaccacttccaggggaacctgccatgccaggaacctgtcctaaggaaccttccttcctgcttgagttcccagatggctggaaggggtccagcctcgttggaagaggaacagcactggggagtctttgtggattctgaggccctgcccaatgagactctagggtccagtggatgccacagcccagcttggccctttccttccagatcctgggtactgaaagccttagggaagctggcctgagaggggaagcggccctaagggagtgtctaagaacaaaagcgacccattcagagactgtccctgaaacctagtactgccccccatgaggaaggaacagcaatggtgtcagtatccaggctttgtacagagtgcttttctgtttagtttttactttttttgttttgtgtttttaaagatgaa

SEQ ID NO: 909 - DNA, 4816 bp, Homo sapiens
gttcccggatttttgtgggcgcctgccccgcccctcgtccccctgctgtgtccatatatcgaggcgatagggttaagggaaggcggacgcctgatgggttaatgagcaaactgaagtgttttccatgatcttttttgagtcgcaattgaagtaccacctcccgagggtgattgcttccccatgcggggtagaacctttgctgtcctgttcaccactctacctccagcacagaatttggcttatgcctactcaatgtgaagatgatgaggatgaaaacctttgtgatgatccacttccacttaatgaatggtggcaaagcaaagctatattcaagaccacatgcaaagctactccctgagcaaagagtcacagataaaacgggggcaccagtagaatggccaggacaaacgcagtgcagcacagagactcagaccctggcagccatgcctgcgcaggcagtgatgagagtgacatgtactgttgtggacatgcacaaaagtgagtgtgcaccggcacagacatgaagctgcggctccctgccagtcccgagacccacctggacatgctccgccacctctaccagggctgccaggtggtgcagggaaacctggaactcacctacctgcccaccaatgccagcctgtccttcctgcaggatatccaggaggtgcagggctacgtgctcatcgctcacaaccaagtgaggcaggtcccactgcagaggctgcggattgtgcgaggcacccagctctttgaggacaactatgccctggccgtgctagacaatggagacccgctgaacaataccacccctgtcacaggggcctccccaggaggcctgcgggagctgcagcttcgaagcctcacagagatcttgaaaggaggggtcttgatccagcggaacccccagctctgctaccaggacacgattttgtggaaggacatcttccacaagaacaaccagctggctctcacactgatagacaccaaccgctctcgggcctgccacccctgttctccgatgtgtaagggctcccgctgctggggagagagttctgaggattgtcagagcctgacgcgcactgtctgtgccggtggctgtgcccgctgcaaggggccactgcccactgactgctgccatgagcagtgtgctgccggctgcacgggccccaagcactctgactgcctggcctgcctccacttcaaccacagtggcatctgtgagctgcactgcccagccctggtcacctacaacacagacacgtttgagtccatgcccaatcccgagggccggtatacattcggcgccagctgtgtgactgcctgtccctacaactacctttctacggacgtgggatcctgcaccctcgtctgccccctgcacaaccaagaggtgacagcagaggatggaacacagcggtgtgagaagtgcagcaagccctgtgcccgagtgtgctatggtctgggcatggagcacttgcgagaggtgagggcagttaccagtgccaatatccaggagtttgctggctgcaagaagatctttgggagcctggcatttctgccggagagctttgatggggacccagcctccaacactgccccgctccagccagagcagctccaagtgtttgagactctggaagagatcacaggttacctatacatctcagcatggccggacagcctgcctgacctcagcgtcttccagaacctgcaagtaatccggggacgaattctgcacaatggcgcctactcgctgaccctgcaagggctgggcatcagctggctggggctgcgctcactgagggaactgggcagtggactggccctcatccaccataacacccacctctgcttcgtgcacacggtgccctgggaccagctctttcggaacccgcaccaagctctgctccacactgccaaccggccagaggacgagtgtgtgggcgagggcctggcctgccaccagctgtgcgcccgagggcactgctggggtccagggcccacccagtgtgtcaactgcagccagttccttcggggccaggagtgcgtggaggaatgccgagtactgcaggggctccccagggagtatgtgaatgccaggcactgtttgccgtgccaccctgagtgtcagccccagaatggctcagtgacctgttttggaccggaggctgaccagtgtgtggcctgtgcccactataaggaccctcccttctgcgtggcccgctgccccagcggtgtgaaacctgacctctcctacatgcccatctggaagtttccagatgaggagggcgcatgccagccttgccccatcaactgcacccactcctgtgtggacctggatgacaagggctgccccgccgagcagagagccagccctctgacgtccatcatctctgcggtggttggcattctgctggtcgtggtcttgggggtggtctttgggatcctcatcaagcgacggcagcagaagatccggaagtacacgatgcggagactgctgcaggaaacggagctggtggagccgctgacacctagcggagcgatgcccaaccaggcgcagatgcggatcctgaaagagacggagctgaggaaggtgaaggtgcttggatctggcgcttttggcacagtctacaagggcatctggatccctgatggggagaatgtgaaaattccagtggccatcaaagtgttgagggaaaacacatcccccaaagccaacaaagaaatcttagacgaagcatacgtgatggctggtgtgggctccccatatgtctcccgccttctgggcatctgcctgacatccacggtgcagctggtgacacagcttatgccctatggctgcctcttagaccatgtccgggaaaaccgcggacgcctgggctcccaggacctgctgaactggtgtatgcagattgccaaggggatgagctacctggaggatgtgcggctcgtacacagggacttggccgctcggaacgtgctggtcaagagtcccaaccatgtcaaaattacagacttcgggctggctcggctgctggacattgacgagacagagtaccatgcagatgggggcaaggtgcccatcaagtggatggcgctggagtccattctccgccggcggttcacccaccagagtgatgtgtggagttatggtgtgactgtgtgggagctgatgacttttggggccaaaccttacgatgggatcccagcccgggagatccctgacctgctggaaaagggggagcggctgccccagccccccatctgcaccattgatgtctacatgatcatggtcaaatgttggatgattgactctgaatgtcggccaagattccgggagttggtgtctgaattctcccgcatggccagggacccccagcgctttgtggtcatccagaatgaggacttgggcccagccagtcccttggacagcaccttctaccgctcactgctggaggacgatgacatgggggacctggtggatgctgaggagtatctggtaccccagcagggcttcttctgtccagaccctgccccgggcgctgggggcatggtccaccacaggcaccgcagctcatctaccaggagtggcggtggggacctgacactagggctggagccctctgaagaggaggcccccaggtctccactggcaccctccgaaggggctggctccgatgtatttgatggtgacctgggaatgggggcagccaaggggctgcaaagcctccccacacatgaccccagccctctacagcggtacagtgaggaccccacagtacccctgccctctgagactgatggctacgttgcccccctgacctgcagcccccagcctgaatatgtgaaccagccagatgttcggccccagcccccttcgccccgagagggccctctgcctgctgcccgacctgctggtgccactctggaaaggcccaagactctctccccagggaagaatggggtcgtcaaagacgtttttgcctttgggggtgccgtggagaaccccgagtacttgacaccccagggaggagctgcccctcagccccaccctcctcctgccttcagcccagccttcgacaacctctattactgggaccaggacccaccagagcggggggctccacccagcaccttcaaagggacacctacggcagagaacccagagtacctgggtctggacgtgccagtgtgaaccagaaggccaagtccgcagaagccctgatgtgtcctcagggagcagggaaggcctgacttctgctggcatcaagaggtgggagggccctccgaccacttccaggggaacctgccatgccaggaacctgtcctaaggaaccttccttcctgcttgagttcccagatggctggaaggggtccagcctcgttggaagaggaacagcactggggagtctttgtggattctgaggccctgcccaatgagactctagggtccagtggatgccacagcccagcttggccctttccttccagatcctgggtactgaaagccttagggaagctggcctgagaggggaagcggccctaagggagtgtctaagaacaaaagcgacccattcagagactgtccctgaaacctagtactgccccccatgaggaaggaacagcaatggtgtcagtatccaggctttgtacagagtgcttttctgtttagtttttactttttttgttttgtttttttaaagatgaaataaagacccagggggagaatgggtgttgtatggggaggcaagtgtggggggtccttctccacacccactttgtccatttgcaaatatattttggaaaacagcta

SEQ ID NO: 910 - DNA, 506 bp, Homo sapiens
taaaaagagggtggtttgagtgtaacaatactgattcaaaactgaaatggaagacagtttctccctagaatactttagggtttttcagagtccttttccataaaaggaatataattgaaacacatctcagttaggtgagatgagattgctaaaatacatacagaactaaaaaaacagccaaaacaaagtcagtttaatctcttcaactcctaatgatttccgttggttgcagtctttttttcctaaagcctattgcataactgcaagggaattgctttcttccgctagggaggtcagcaaagaactcatgtccccgatagccatgttggtggtgctcatggacagcgctgggaatgggagggacgcccgagggctggttaaagccggaagaacctatggaaaaggtctcaatgatacttgggctcagggccccgacatcaggctcgagtggtccccatctctatgattgcatcgaagtcaatctggtaccctcccaggccaggctg

SEQ ID NO: 911 - DNA, 5054 bp, Homo sapiens
cgatactacgtgggcatttttggtcgaagagagctgaagtaatgagaagacatcatggaggcccagtcccacagctccacgaccactgaaaagaaaaaagttgagaattccatagtgaagtgctccactcgaacagatgtgagcgagaaagccgttgcctccagcaccacttctaatgaggatgaaagtcctggacagacttatcacagagagagaagaaacgcaatcactatgcagccacagaatgtccaggggctcagcaaagtcagtgaggaaccttcaacatcgagtgacgagagggcctcattgatcaagaaagagatccatgggtccctgccacacgtggcggagccctctgtgccgtaccgcgggacggtgtttgccatggaccccaggaatggttacatggagccccactaccaccctcctcatcttttccctgccttccatcctcctgtaccaattgatgccagacatcatgagggccgttaccattacgatccatctccgattcctccattgcatatgacttccgccttatctagtagccctacgtatccggacctgcccttcattaggatctccccacaccggaaccccgctgctgcttccgagtctcccttcagccctccacatccctacattaatccctacatggactatatccgctccttgcacagcagcccatcgctctccatgatctcagcaacccgtgggctgagccctacagatgcgccccatgcaggagtcagcccagcagaatactatcatcagatggccctgctaactggccagcgcagcccctatgcagacattattccctcagctgccaccgccggcacgggggccatccacatggaatatcttcatgctatggatagcaccagattctccagccccaggctgtcagccaggccgagccgaaaacgtacactgtccatatcaccactctccgatcatagctttgaccttcagaccatgataaggacgtctcccaactccttggtcacgattctcaataattcccgtagcagctcttcagcaagtggctcctatggtcacttatctgcaagtgcaatcagccctgccttgagcttcacctactcttccgcgcccgtctctctccacatgcatcagcagatcctaagccgacaacagagcttaggttcagcctttggacacagccctccactcatccaccctgccccaacttttccaacacagaggcctattccagggatccctacggttctgaaccccgtccaggtcagctccggcccttctgagtcctcacagaacaagcccacgagtgagtctgcagtgagcagcactggtgacccgatgcacaacaagaggtccaagatcaaacccgatgaagacctccccagcccaggggctcgggggcagcaggaacagcccgaaggaacaacccttgtcaaggaggaaggggacaaagatgaaagcaaacaggagcctgaagtcatctatgagacaaactgccactgggaaggctgcgcgagggagttcgacacccaagagcagcttgtgcaccatataaataacgaccatattcatggagagaagaaggagttcgtgtgcaggtggctggactgctcaagagagcagaaacccttcaaagcccagtatatgttggtagtgcatatgagaagacacacgggcgagaagcctcacaaatgcacttttgaaggttgcacaaaggcctactcgagactagaaaacttgaaaacacacttgagatctcacactggagagaaaccatacgtctgtgagcacgaaggttgcaacaaggctttctcaaatgcctctgatcgcgccaaacaccaaaacagaacgcattccaatgagaaaccatatgtgtgcaaaatcccaggctgcactaagcgttacacagacccaagctccctccggaaacatgtgaagacagtgcatggcccagaggctcatgtcaccaagaagcagcgaggggacatccatcctcggccgccacccccgagagattccggcagccattcacagtccaggtcgcctggccgaccgactcagggagcccttggtgagcagcaggacctcagcaacactacctcaaagcgggaagaatgcctccaggtgaaaaccgtcaaggcagagaagccaatgacatctcagccaagccctggtggtcagtcttcatgcagcagccaacagtcccccatcagcaactattccaacagtgggctcgagcttcctctgaccgatggaggtagtataggagacctcagtgccatcgatgaaaccccaatcatggactcaaccatttccactgcaaccacagcccttgctttgcaagccaggagaaacccggcagggaccaaatggatggagcacgtaaaactagaaaggctaaaacaagtgaatggaatgtttccgcgactgaaccccattctaccccctaaagcccctgcggtctctcctctcataggaaatggcacacagtccaacaacacctgcagcttgggtgggcccatgacgcttctcccgggcagaagcgacctctctggggtggacgtcactatgctgaacatgctcaacagaagggacagcagcgccagcaccatcagctcggcctacctgagcagccgccgctcctcagggatctcgccctgcttctccagccgccgctccagcgaggcgtcacaggccgagggccggccgcagaacgtgagcgtggccgactcctacgaccccatctccaccgacgcctcgcgccgctccagcgaagccagccagagcgacggcctgcccagcctgctcagcctcacgcccgcccagcagtaccgcctcaaggccaagtacgcggctgccacaggagggccgccgccgacgcccctgcccaacatggagaggatgagcctgaagacgcgcctggcgctgctcggggatgccctcgagcctggcgtggccctgcctccagttcatgccccgaggaggtgcagcgacgggggagcccacggctacgggcggcgccacctgcagccgcacgatgcgctgggccacggcgtgaggagggccagcgacccggtgcggacaggctccgagggcctggccctgcctcgtgtgccgcgcttcagcagcctcagcagctgcaaccccccggcgatggccacgtccgcggagaagcgcagtctcgtgcttcagaattacacgcggcccgagggcggccagtcccgaaacttccactcgtccccctgtcctcccagcatcaccgagaacgtcaccctggagtccctgaccatggacgctgatgccaacctgaacgatgaggatttcctgccggacgacgtggtgcagtatttaaattcccagaaccaagcagggtacgagcagcacttccccagcgccctcccggacgacagcaaagtgccccacgggcccggtgactttgacgcgcccgggctgccagacagccacgctggccagcagttccatgccctcgagcagccctgccccgagggcagcaaaaccgacctgcccattcagtggaacgaagtcagctccggaagcgccgacctgtcctcctccaagctcaagtgtgggccgcggcccgctgtgccgcagactcgcgcctttgggttctgcaacggcatggtcgtccacccgcagaaccccttgaggagcgggcctgctgggggctatcagaccctcggggagaacagcaacccctacggtggcccagagcacttgatgctccacaacagccccggaagtggcaccagtggaaacgccttccatgaacagccctgtaaggccccgcagtatgggaactgtctcaacaggcagccagtggcccctggtgcactcgacggtgcctgtggtgccgggattcaagcctcaaagctgaagagcacccccatgcaagggagcgggggccagctgaatttcggcctgccggtagcgccaaatgagtcagctggcagcatggtgaatggcatgcagaaccaggacccagtgggacaggggtacctggctcaccagctcctcggcgacagcatgcagcacccgggggcaggccgccccggtcagcagatgcttgggcagattagtgctacctcacacatcaacatctaccaagggccagagagctgcctgccaggggctcacggcatgggcagccagccgtcaagcttggcagttgtcaggggctaccagccatgtgccagctttgggggcagcaggcgccaggctatgccgagggacagccttgctctgcagtcaggacagctcagtgacacaagtcagacctgcagggtgaatggtatcaagatggagatgaaagggcagccccatccgctgtgctctaatctgcagaattactctggtcagttctatgaccaaaccgtgggcttcagtcagcaagacacgaaagctggttcattctctatttcagacgccagctgcctgctacaggggaccagcgccaaaaactctgagttactttccccaggtgctaatcaggtgacaagcacagtggacagcctcgacagccatgacctggaaggggtacagattgacttcgatgccatcatagacgatggggaccactccagcctgatgtcgggggccctgagcccaagtatcattcagaacctttcccatagctcctcccgcctcaccacgcctcgggcgtccctcccattcccagcgctgtccatgagcaccaccaacatggctatcggggacatgagttctttgctgacctccctagcggaagaaagcaaattccttgcagttatgcaataggctttaggaaaaaaagactgcaaccaacggaaatcaataggagttgaagagattaaactgactttgttttggctgtttttttagttctgtatgtattttagcaatctcatctcacctaactgagatgtgtttcaattatattccttttatggaaaaggactctgaaaaaccctaaagtattctagggagaaactgtcttccatttcagttttgaatcagtattgttacactcaaaccaccctctttttaaaaaaaaa

SEQ ID NO: 912 - DNA, 237 bp, Homo sapiens
tttttttttttttttttaacgtcatcaaaatatttattaaaaccaaagcaggagggaacagagctgttaggaagcaaatcaaagtgcagattggagggtggggcagagcagtggggaggcaggcgcttcagacactgcaggagggaccacagggtctgggctgggggaggcctcgataaataaataacgctccattaaagcttcaatcagaaaaaaacctttaagacagaagtgctc

SEQ ID NO: 913 - DNA, 158 bp, Homo sapiens
aggccagggcagtgctgctcccagaatctggtgctctgaccaggccaggtggggaggctttggctggctgggcgtgtaggacggtgagagcacttctgtcttaaaggtttttttctgattgaagctttaatggagcgttatttatttatcgaggcctc

SEQ ID NO: 914 - DNA, 2486 bp, Homo sapiens
ccgggactttgcaggcagcggcggccgggggcggagcgggatcgagccctcgccgaggcctgccgccatgggcccgcgccgccgccgccgcctgtcacccgggccgcgcgggccgtgagcgtcatggccttggccggggcccctgcgggcggcccatgcgcgccggcgctggaggccctgctcggggccggcgcgctgcggctgctcgactcctcgcagatcgtcatcatctccgccgcgcaggacgccagcgccccgccggctcccaccggccccgcggcgcccgccgccggcccctgcgaccctgacctgctgctcttcgccacaccgcaggcgccccggcccacacccagtgcgccgcggcccgcgctcggccgcccgccggtgaagcggaggctggacctggaaactgaccatcagtacctggccgagagcagtgggccagctcggggcagaggccgccatccaggaaaaggtgtgaaatccccgggggagaagtcacgctatgagacctcactgaatctgaccaccaagcgcttcctggagctgctgagccactcggctgacggtgtcgtcgacctgaactgggctgccgaggtgctgaaggtgcagaagcggcgcatctatgacatcaccaacgtccttgagggcatccagctcattgccaagaagtccaagaaccacatccagtggctgggcagccacaccacagtgggcgtcggcggacggcttgaggggttgacccaggacctccgacagctgcaggagagcgagcagcagctggaccacctgatgaatatctgtactacgcagctgcgcctgctctccgaggacactgacagccagcgcctggcctacgtgacgtgtcaggaccttcgtagcattgcagaccctgcagagcagatggttatggtgatcaaagcccctcctgagacccagctccaagccgtggactcttcggagaactttcagatctcccttaagagcaaacaaggcccgatcgatgttttcctgtgccctgaggagaccgtaggtgggatcagccctgggaagaccccatcccaggaggtcacttctgaggaggagaacagggccactgactctgccaccatagtgtcaccaccaccatcatctcccccctcatccctcaccacagatcccagccagtctctactcagcctggagcaagaaccgctgttgtcccggatgggcagcctgcgggctcccgtggacgaggaccgcctgtccccgctggtggcggccgactcgctcctggagcatgtgcgggaggacttctccggcctcctccctgaggagttcatcagcctttccccaccccacgaggccctcgactaccacttcggcctcgaggagggcgagggcatcagagacctcttcgactgtgactttggggacctcacccccctggatttctgacagggcttggagggaccagggtttccagagtagctcaccttgtctctgcagccctggagccccctgtccctggccgtcctcccagcctgtttggaaacatttaatttatacccctctcctctgtctccagaagcttctagctctggggtctggctaccgctaggaggctgagcaagccaggaagggaaggagtctgtgtggtgtgtatgtgcatgcagcctacacccacacgtgtgtaccgggggtgaatgtgtgtgagcatgtgtgtgtgcatgtaccggggaatgaaggtgaacatacacctctgtgtgtgcactgcagacacgccccagtgtgtccacatgtgtgtgcatgagtccatctctgcgcgtgggggggctctaactgcactttcggcccttttgctcgtggggtcccacaaggcccagggcagtgcctgctcccagaatctggtgctctgaccaggccaggtggggaggctttggctggctgggcgtgtaggacggtgagagcacttctgtcttaaaggttttttctgattgaagctttaatggagcgttatttatttatcgaggcctctttggtgagcctggggaatcagcaaaaggggaggaggggtgtggggttgataccccaactccctctacccttgagcaagggcaggggtccctgagctgttcttctgccccatactgaaggaactgaggcctgggtgatttatttattgggaaagtgagggagggagacagactgactgacagccatgggtggtcagatggtggggtgggccctctccagggggccagttcagggcccagctgccccccaggatggatatgagatgggagaggtgagtgggggaccttcactgatgtgggcaggaggggtggtgaaggcctcccccagcccagaccctgtggtccctcctgcagtgtctgaagcgcctgcctccccactgctctgccccaccctccaatctgcactttgatttgcttcctaacagctctgttccctcctgctttggttttaataaatattttgatgacgtt

SEQ ID NO: 915 - DNA, 348 bp, Homo sapiens
tgaacatattcattgtttgtttattaataaattaccattcagtttgaatgagacctatatgtctggatactttaatagagctttaattattacgaaaaaagatttcagagataaaacactagaagttacctattctccacctaaatctctgaaaaatggagaaaccctctgactagtccatgtcaaattttactaaaagtctttttgtttagatttattttcctgcagcatcttctgcaaaatgtactatatagtcagcttgctttgaggctagtaaaaagatatttttctaaacagattggagttggcatataaacaaatacgttttctcactaatgacagtccatg

SEQ ID NO: 916 - DNA, 1662 bp, Homo sapiens
atgcaggcgcgctactccgtgtccagccccaactccctgggagtggtgccctacctcggcggcgagcagagctactaccgcgcggcggccgcggcggccgggggcggctacaccgccatgccggcccccatgagcgtgtactcgcaccctgcgcacgccgagcagtacccgggcggcatggcccgcgcctacgggccctacacgccgcagccgcagcccaaggacatggtgaagccgccctatagctacatcgcgctcatcaccatggccatccagaacgccccggacaagaagatcaccctgaacggcatctaccagttcatcatggaccgcttccccttctaccgggacaacaagcagggctggcagaacagcatccgccacaacctctcgctcaacgagtgcttcgtcaaggtgccgcgcgacgacaagaagccgggcaagggcagctactggacgctggacccggactcctacaacatgttcgagaacggcagcttcctgcggcggcggcggcgcttcaagaagaaggacgcggtgaaggacaaggaggagaaggacaggctgcacctcaaggagccgcccccgcccggccgccagcccccgcccgcgccgccggagcaggccgacggcaacgcgcccggtccgcagccgccgcccgtgcgcatccaggacatcaagaccgagaacggtacgtgcccctcgccgccccagcccctgtccccggccgccgccctgggcagcggcagcgccgccgcggtgcccaagatcgagagccccgacagcagcagcagcagcctgtccagcgggagcagccccccgggcagcctgccgtcggcgcggccgctcagcctggacggtgcggattccgcgccgccgccgcccgcgccctccgccccgccgccgcaccatagccagggcttcagcgtggacaacatcatgacgtcgctgcgggggtcgccgcagagcgcggccgcggagctcagctccggccttctggcctcggcggccgcgtcctcgcgcgcggggatcgcacccccgctggcgctcggcgcctactcgcccggccagagctccctctacagctccccctgcagccagacctccagcgcgggcagctcgggcggcggcggcggcggcgcgggggccgcggggggcgcgggcggcgccgggacctaccactgcaacctgcaagccatgagcctgtacgcggccggcgagcgcgggggccacttgcagggcgcgcccgggggcgcgggcggctcggccgtggacaaccccctgcccgactactctctgcctccggtcaccagcagcagctcgtcgtccctgagtcacggcggcggcggcggcggcggcgggggaggccaggaggccggccaccaccctgcggcccaccaaggccgcctcacctcgtggtacctgaaccaggcgggcggagacctgggccacttggcaagcgcggcggcggcggcggcggccgcaggctacccgggccagcagcagaacttccactcggtgcgggagatgttcgagtcacagaggatcggcttgaacaactctccagtgaacgggaatagtagctgtcaaatggccttcccttccagccagtctctgtaccgcacgtccggagctttcgtctacgactgtagcaagttttga

SEQ ID NO: 917 - DNA, 528 bp, Homo sapiens
gctggtttaccttttatataataagtactgccaatatattaaaaggtggtgctgagcaaaaccattcaataaagatttgtcatttgatacatatggcacaatgtctgctgagaaagctaatcacactgattgatccatgcattgaatgtacgaagagttgaagggaaaggggaaaggatgataaagacaatgtcatgagatgtcagagaaaatactaatttcataatgcagctcaacaatagaaatcaatttcaaaatgaaatatgatgcataaactaagattaaagttagttaatgtggctgggcatagcagatgggactcttagaagaggtggcctccagggtggcagggcatttgccctggctcagggctcctggttccctccgtgggcccaccaagttcactggggccctcgcagcttccaggcccctcaggcattcagcttcaggtcgctgatgtatttctggaccatttcttattggggtcacacagatctgcggccttcttggtttagaggtgacactggg

SEQ ID NO: 918 - DNA, 393 bp, Homo sapiens
gagttgtgagtttccaagccccagctcactctgaccacttctctgcctgcccagcatcatgaagggccttgcagctgccctccttgtcctcgtctgcaccatggccctctgctcctgtgcacaagttggtaccaacaaagagctctgctgcctcgtctatacctcctggcagattccacaaaagttcatagttgactattctgaaaccagcccccagtgccccaagccaggtgtcatcctcctaaccaagagaggccggcagatctgtgctgaccccaataagaagtgggtccagaaatacatcagcgacctgaagctgaatgcctgaggggcctggaagctgcgagggcccagtgaacttggtgggcccaggagggaacaggagcctgagcc

SEQ ID NO: 919 - DNA, 793 bp, Homo sapiens
aggagttgtgagtttccaagccccagctcactctgaccacttctctgcctgcccagcatcatgaagggccttgcagctgccctccttgtcctcgtctgcaccatggccctctgctcctgtgcacaagttggtaccaacaaagagctctgctgcctcgtctatacctcctggcagattccacaaaagttcatagttgactattctgaaaccagcccccagtgccccaagccaggtgtcatcctcctaaccaagagaggccggcagatctgtgctgaccccaataagaagtgggtccagaaatacatcagcgacctgaagctgaatgcctgaggggcctggaagctgcgagggcccagtgaacttggtgggcccaggagggaacaggagcctgagccagggcaatggccctgccaccctggaggccacctcttctaagagtcccatctgctatgcccagccacattaactaactttaatcttagtttatgcatcatatttcattttgaaattgatttctattgttgagctgcattatgaaattagtattttctctgacatctcatgacattgtctttatcatcctttcccctttcccttcaactcttcgtacattcaatgcatggatcaatcagtgtgattagctttctcagcagacattgtgccatatgtatcaaatgacaaatctttattgaatggttttgctcagcaccaccttttaatatattggcagtacttattatataaaaggtaaaccagcattctcactgtgaaaaaaaaaaaaaaaaaaaaaaaa

SEQ ID NO: 920 - DNA, 417 bp, Homo sapiens
tttgtacaaaaatatatttatttggtgtaatagttacaaaatattcatttccacaataatattttagcaatgcattggaatgttaaaaaaaattctttgtattaatgattcttgcaaagaccctcaaaacatcccaggggtagaactgtggttcaagaggaaaagcaatttccccaagtctctgtatctaaaaaacactagtaccatgaaagataaacttaaaacatcaataacttaaataagaattaacattacttaaggcataatgtttcacatcaacaaacaaaattcattatatgaaaataaaacagggtgtctggggaaagctaggggaaattaagttagctccacattcttgggttggggagggggtgtctagtcttcggattttgggtttgtttttccagtgggtcctgg

SEQ ID NO: 921 - DNA, 415 bp, Homo sapiens
catggaccacgtggacaagcaaacccaaactccgaagacttgaacactcactccacaacccaagaatctgcagctaacttattttcccctagctttccccagacaccctgttttattttattataatgaattttgtttgttgatgtgaaacattatgccttaagtaatgttaattcttatttaagttattgatgttttaagtttatctttcatggtactagtgttttttagatacagagacttggggaaattgcttttcctcttgaaccacagttctacccctgggatgttttgagggtctttgcaagaatcattaatacaaagaattttttttaacattccaatgcattgctaaaatattattgtggaaatgaatattttgtaactattacaccaaataaatatattcttgtac

SEQ ID NO: 922 - DNA, 760 bp, Homo sapiens
gaggaaccgagaggctgagactaacccagaaacatccaattctcaaactgaagctcgcactctcgcctccagcatgaaagtctctgccgcccttctgtgcctgctgctcatagcagccaccttcattccccaagggctcgctcagccagatgcaatcaatgccccagtcacctgctgttataacttcaccaataggaagatctcagtgcagaggctcgcgagctatagaagaatcaccagcagcaagtgtcccaaagaagctgtgatcttcaagaccattgtggccaaggagatctgtgctgaccccaagcagaagtgggttcaggattccatggaccacctggacaagcaaacccaaactccgaagacttgaacactcactccacaacccaagaatctgcagctaacttattttcccctagctttccccagacaccctgttttattttattataatgaattttgtttgttgatgtgaaacattatgccttaagtaatgttaattcttatttaagttattgatgttttaagtttatctttcatggtactagtgttttttagatacagagacttggggaaattgcttttcctcttgaaccacagttctacccctgggatgttttgagggtctttgcaagaatcattaatacaaagaattttttttaacattccaatgcattgctaaaatattattgtggaaatgaatattttgtaactattacaccaaataaatatatttttgtacaaaaaaaaaaaaaaa

SEQ ID NO: 923 - DNA, 288 bp, Homo sapiens
tttttttttttacagaagacaaaacaataccctttttatttttaaaactctggtgaaataggtttccataggacatcccattcaaaaaaaaaaattaatgtaaaccaacctgcctgtgggttagtcacactatacagacttcatcagagtgtttacagatacctagagtatttacaaatgctatccgttaggtagtaaagtgttgttgcaatttttccagcacatattccacagtaaaataaagggggtatattggtgttcttgtataaaaattcttaacaaatagag

SEQ ID NO: 924 - DNA, 384 bp, Homo sapiens
ttcggcacaggatgaagggaagggccagtgcaactggcgcttgggcactccagccagcccgcctccggggcgaccctgctccacttccagaagccaggactaggacctgggccttcctgctatggaatattgagagagattttttaaaaaagattttgcattttgtccaaaatcatgtgcttcttctgatcaattttggttgttccagaatttcttcataccttttccacatccagatttcatgtgcgttcatggagaagatcacttgaggccatttggtacacatctctggaggctgagtcggttcatgaggtctcttatcaaaaatattactcagtttgcaagactgcattgtaactttaacatacactgtgactgacgttt

SEQ ID NO: 925 - DNA, 3494 bp, Homo sapiens
ggcacccttcggcgagcgctgtttgtttagggctcggtgagtccaatcaggagcccaggctgcagttttccggcagagcagtaagaggcgcctcctctctcctttttattcaccagcagcgcggcgcagaccccggactcgcgctcgcccgctggcgccctcggcttctctccgcgcctgggagcaccctccgccgcggccgttctccatgcgcagcgcccgcccgaggagctagacgtcagcttggagcggcgccggaccgtggatggccttgactgacggcggctggtgcttgccgaagcgcttcggggccgcgggtgcggacgccagcgactccagagcctttccagcgcgggagccctccacgccgccttcccccatctcttcctcgtcctcctcctgctcccggggcggagagcggggccccggcggcgccagcaactgcgggacgcctcagctcgacacggaggcggcggccggacccccggcccgctcgctgctgctcagttcctacgcttcgcatcccttcggggctccccacggaccttcggcgcctggggtcgcgggccccgggggcaacctgtcgagctgggaggacttgctgctgttcactgacctcgaccaagccgcgaccgccagcaagctgctgtggtccagccgcggcgccaagctgagccccttcgcacccgagcagccggaggagatgtaccagaccctcgccgctctctccagccagggtccggccgcctacgacggcgcgcccggcggcttcgtgcactctgcggccgcggcggcagcagccgcggcggcggccagctccccggtctacgtgcccaccacccgcgtgggttccatgctgcccggcctaccgtaccacctgcaggggtcgggcagtgggccagccaaccacgcgggcggcgcgggcgcgcaccccggctggcctcaggcctcggccgacagccctccatacggcagcggaggcggcgcggctggcggcggggccgcggggcctggcggcgctggctcagccgcggcgcacgtctcggcgcgcttcccctactctcccagcccgcccatggccaacggcgccgcgcgggagccgggaggctacgcggcggcgggcagtgggggcgcgggaggcgtgagcggcggcggcagtagcctggcggccatgggcggccgcgagccccagtacagctcgctgtcggccgcgcggccgctgaacgggacgtaccaccaccaccaccaccaccaccaccaccatccgagcccctactcgccctacgtgggggcgccactgacgcctgcctggcccgccggacccttcgagaccccggtgctgcacagcctgcagagccgcgccggagccccgctcccggtgccccggggtcccagtgcagacctgctggaggacctgtccgagagccgcgagtgcgtgaactgcggctccatccagacgccgctgtggcggcgggacggcaccggccactacctgtgcaacgcctgcgggctctacagcaagatgaacggcctcagccggcccctcatcaagccgcagaagcgcgtgccttcatcacggcggcttggattgtcctgtgccaactgtcacaccacaactaccaccttatggcgcagaaacgccgagggtgaacccgtgtgcaatgcttgtggactctacatgaaactccatggggtgcccagaccacttgctatgaaaaaagagggaattcaaaccaggaaacgaaaacctaagaacataaataaatcaaagacttgctctggtaatagcaataattccattcccatgactccaacttccacctcttctaactcagatgattgcagcaaaaatacttcccccacaacacaacctacagcctcaggggcgggtgccccggtgatgactggtgcgggagagagcaccaatcccgagaacagcgagctcaagtattcgggtcaagatgggctctacataggcgtcagtctcgcctcgccggccgaagtcacgtcctccgtgcgaccggattcctggtgcgccctggccctggcctgagcccacgccgccaggaggcagggagggctccgccgcgggcctcactccactcgtgtctgcttttgtgcagcggtccagacagtggcgactgcgctgacagaacgtgattctcgtgcctttattttgaaagagatgtttttcccaagaggcttgctgaaagagtgagagaagatggaagggaagggccagtgcaactgggcgcttgggccactccagccagcccgcctccggggcggaccctgctccacttccagaagccaggactaggacctgggccttgcctgctatggaatattgagagagattttttaaaaaagattttgcattttgtccaaaatcatgtgcttcttctgatcaattttggttgttccagaatttcttcataccttttccacatccagatttcatgtgcgttcatggagaagatcacttgaggccatttggtacacatctctggaggctgagtcggttcatgaggtctcttatcaaaaatattactcagtttgcaagactgcattgtaactttaacatacactgtgactgacgtttctcaaagttcatattgtgtggctgatctgaagtcagtcggaatttgtaaacagggtagcaaacaagatatttttcttccatgtatacaataatttttttaaaaagtgcaatttgcgttgcagcaatcagtgttaaatcatttgcataagatttaacagcattttttataatgaatgtaaacattttaacttaatggtacttaaaataatttaaaagaaaaatgttaacttagacattcttatgcttcttttacaactacatcccattttatatttccaattgttaaagaaaaatatttcaagaacaaatcttctctcaggaaaattgcctttctctatttgttaagaatttttatacaagaacaccaatataccccctttattttactgtggaatatgtgctggaaaaattgcaacaacactttactacctaacggatagcatttgtaaatactctaggtatctgtaaacactctgatgaagtctgtatagtgtgactaacccacaggcaggttggtttacattaatttttttttttgaatgggatgtcctatggaaacctatttcaccagagttttaaaaataaaaagggtattgttttgtcttctgtacagtgagttccttcccttttcaaagctttctttttatgctgtatgtgactatagatattcatataaaacaagtgcacgtgaagtttgcaaaatgctttaaggccttcctttcaaagcatagtccttttggagccgttttgtaccttttataccttggcttatttgaagttgacacatggggttagttactactctccatgtgcattggggacagtttttataagtgggaaggactcagtattattatatttgagatgataagcattttgtttgggaacaatg

SEQ ID NO: 926 - DNA, 417 bp, Homo sapiens
ttttttgttttttttttttttttttttttgtacttggcagcagcttttttaatttgaacactttcttcttgaggacacaccttcagtacagttaacaaatggttacacctgaaatctgctgagagcagagcttaagatccacaattgcaaaggccactgctggctcacttcctcacaggctgtattacctttcagagctgagtgaggctgtgctctacgtcccaatacttgttactgagtggacatgaggtgcaagtttagcaccttaaagggagaaaaaaataggttagtatgcagaatgtgattttgtcctcacttcaccttaagtcatctttttacacttgccaatgtgagttctgaaaggtagtactatatctgcttagaaatggcgagtgactgccaattaaaagccacatg

SEQ ID NO: 927 - DNA, 5394 bp, Homo sapiens
atgaggaggcggaggtcggcggtcgggtccgtctctgcccgcggctgtggcggcgccggcggatccagccttagcggtttctctctgggcggcggcggcggcggctcggttgacgcctcctccgccagctgagcccgcgggagcccaggacgccgcttccccgcccatccccgctccccgaggccggccgcctggtcatggcgcagccgggcccggcttcccagcctgacgtttctcttcagcaacgggtagcagaattggaaaaaattaatgcagaatttttacgtgcacaacagcagcttgaacaagaatttaatcaaaagagagcaaaatttaaggagttatatttggctaaagaggaggatctgaagaggcaaaatgcagtattacaagctgcacaagatgatttgggacaccttcgaacccagctgtgggaagctcaagcagagatggagaatattaaggcgattgccacagtctctgagaacaccaagcaagaagctatagatgaagtgaaaagacagtggagagaagaagttgcttcacttcaggctgttatgaaagaaacagttcgtgactatgagcaccagttccaccttaggctggagcaggagcgaacacagtgggcacagtatagagaatccgcagagagggaaatagctgatttaagaagaaggctgtctgaaggtcaagaggaggaaaatttagaaaatgaaatgaaaaaggcccaagaggatgctgagaaacttcggtccgttgtgatgccaatggaaaaggaaattgcagctttgaaggataaactgacagaggctgaagacaaaattaaagagctggaggcctcaaaggttaaagaactgaatcattatctggaagctgagaaatcttgtaggactgatctagagatgtatgtagctgttttgaatactcagaaatctgttctacaggaagatgctgagaaactgcggaaagaattgcatgaagtttgccatctcttggagcaagagcgacaacaacacaaccagttaaaacatacgtggcagaaggccaatgaccagtttctggaatctcagcgtttactgatgagagacatgcagcgaatggagattgtgctaacttcagaacagctccgacaagttgaagaactgaagaagaaagatcaggaggatgatgaacaacaaagactcaataagagaaaggatcacaaaaaagcagatgttgaggaagaaataaaaataccagtagtgtgtgctttaactcaagaagaatcttcagcccagttatcaaatgaagaggagcatttagacagcacccgtggctcagttcattccttagatgcaggcttgctgttgccatctggagatcctttcagtaaatcggacaatgacatgtttaaagatggactcaggagagcacagtctacagacagcttgggaacctcgggctcattgcaatccaaagctttaggctataactacaaagcaaaatctgctggaaacctggacgagtcagattttggaccactggtaggagcagattcagtgtctgagaactttgatactgcatcccttgggtcactccagatgccaagtgggtttatgttaaccaaagatcaggaaagagcaatcaaggcgatgacaccagaacaagaagagacagcgtccctcctctccagcgttacccagggcatggagagtgcctatgtgtcccctagtggttatcgtttagttagtgaaacagaatggaatctcttgcagaaagaggtacataatgctggaaataaacttggtagacgttgtgatatgtgttccaattacgaaaaacagttacaaggaattcagattcaggaggctgaaacgagagaccaggtgaaaaaactacagctgatgctaaggcaagctaatgaccagttagagaagacaatgaaagataagcaggagctggaagacttcataaagcaaagcagcgaagattcgagtcaccagatctctgcactcgtcctaagagcccaggcctccgagatcttacttgaagagttacagcaggggctttcccaggcaaagagggatgttcaggaacagatggcggtgctgatgcagtcacgggaacaggtttcagaagagctggtgaggttacagaaagataatgacagtctccagggaaagcacagcctgcatgtgtcattacagcaagcagaagacttcatcctcccagacactacagaggcactgcgggagttggtattaaaataccgtgaggacatcattaatgtgcggacagcagcagaccacgtagaagaaaagctgaaggctgagatacttttcctaaaagagcagatccaagcagaacagtgtttaaaagaaaatcttgaagaaactctgcaactagaaatagaaaactgcaaggaggaaatagcttctatttctagcctaaaagctgaattagaaagaataaaagtggaaaaaggacagttggagtccacattaagagagaagtctcaacagcttgagagtcttcaggaaataaagatcagtttggaagagcagttaaagaaagagactgctgctaaggctaccgttgaacaactaatgtttgaagagaagaataaagctcagagattacagacagaattagatgtcagtgagcaagtccagagggattttgtaaagctttcacagacccttcaggtgcagttagagcggatccggcaagctgactccttggagagaatccgggcaattctgaatgatactaaactgacagacattaaccagcttcctgagacatgacaccctcatggcaggattctagcctgcactttgggtttttaactcatctttagagcaacagtaattattatttaactcttaactgaagaaagagaagtcacaacaaaaggaagactggagaaatgcttacttctagagggagaagactgtgcggcacaggaaacagcaaacagtggggtgatctgcagcccagagaccttcaaatgcgaacactataaactccaggcttgattccaacaggcgtgggatcagatttggtgatggaaaaagcgctgtttccttgcctgctttctccaagacagattttcggaacacatttccctaccctaaagcgacatcccagtagtgtttggaattttctgttcatagatattggaagagagaatttgctttatctgttgtctagagctcatcagtaacagtattcagttagcagacagaagtgtagtatgctgtatgaatattttatattaaaatatgaaggtttgagagcaggccattggctactgactgtattttgttttccttttaccattttatcttatcttgctttggaggaccttaaatgctactgaaacttacctgagaaccataggactgtggcaaacaaaaccaattcatgaagtgaattaatgatgaggatctgaaaacttggctggggctatatatactggaagttgaaggttaaaggaaaagcacaagaaactttggaagcactttttctgcatacttagatgatcttcatgggcccacagggtaccaggataaagccgaactggtaccatctactcttttgaagtgttttagtctagttattggatcagtgaaaaacattagtatacgtttttaaataggctaatttttcaacttggatcattaggcttacgtactacttgtttcaaatgtgtcaaatacaaaaatggtaactaggttgacagatactttgtatttttcttttgaattcagacctggaatgtaagtaagtgacaatgcttatggaaagccagttagttagaattggaaatctgtcttgtcattttacaagcattagattcctttcctgtgtgaagaaagcctcagtgaaacaggtctttgccataactttatgaagtgctacagaaagcacaaagaattgattcatgttcatcaatacctgctgagagtactgtcccaggaatatccagtggatggattcatcatccaggaggttcaaaagtaagatggttttcaaatcatttttgagactggttgcataacagcagggtacctgaaagagccttctgggagttagtgaactaggtagattgttttgttcacataacgccaccatcaacttaaagtgaattgtctttgttataaatgaggtcactatggacttaccctaaagatcttctgtacttctgtcttccataggacaaatgataagtactacatacctcatctcttgggttattattgtagtcttgcattcatggttatgaatttaaaaataaataccaattatggaaatagtactaaaggcttgccgcacatgaaacattattttaattggtttaaagtccctttataaagagtgctacatggtttagataaaggaaacatataactattgagttacaggggattttattaattataaaatgcaatcaatttaaattacgtaggtttaagactagtcccttggataagccccaagcgaatttgtcttcagattattaaaattagtgctgtaaatcagggtgggcaattcacagcctttctgaactgactgaactagagcttgcagtgaagtgttctgctgagactgagcaccttacagatatttttctccagaagatggtgctgggtaataaaatcatcacaattagggaatggttagtggtctctactgtggcaaatgccaactgttggaattcactttattgtagaaaaacccaaactgagactcttaagttttgtttagcaatgtgtttctggtatgaaacaaactactgtgtcactgtccaggtaggaaacaattctttcaactgggttttcagcataaatgggaactgatgtagaaggcaggatttagcccttctaggcaaaagaaaagctcagttgggtttcacgagtgttcctgtgcttatattcagtctgtgcctacatgttctcatgcatgtctaacctgatttacctcttacctgtaacctaccttatcatgtggcttttaattgacagtcactcagccatttctaagcagatatagtagtacctttcagaactcacattggcaagtgtaaaaagatgacttaaggtgaagtgaggacaaaatcacattctgcatactaacctatttttttctccctttaaggtgctaaacttgcacctcatgtccactcagtaacaagtattgggacgtagagcacagcctcactcagctctgaaaggtaatacagcttgtgaggaagtgagccagcagtggcctttgcaattgtggatcttgagctctgctctcagcagatttcaggtgtaaccatttgttaactgtactgaaggtgtgtcctcaagaagaaagtgttcaaattaaaaaagctgctgccaagtacaaaaaaaaaaaaaaaaaaaa

SEQ ID NO: 928 - DNA, 508 bp, Homo sapiens
ttttacatggaaatattccatgggatttatttttaacaaacatttacataaacaataaatgaaaaaaaaacaggtttaaagtgagcagattcatatttacagtgtgatttttaaggactgtctatatccaaattttattttcgtgaacgcttacattctaagagcagtacaattagcctattacgtagggccctaatcttgttagtatagtgttgttgaaatactttcttcagcttttgccttaacaaatccaaagatggaagatgatgacaatctggaatattcaacataacatgaaaaaattcattccacatatccaaatgaggaagccttctaaaaagaccttcaggcttacactctcctccttcatttttcactttcatgtaagtgccaagagcatgcaatatactgttgcagcaaccccaaagtaatcgatctggtagttccatggtttgttgctgagcatctcaacacactgaaaaccagatgtttcacactttgctgtgaa

SEQ ID NO: 929 - DNA, 457 bp, Homo sapiens
ataaaaatacccctgaaaaagtgatgcctcaaggtcttgtcatctcttttgctatgagaatgctttacatgattgagcaagtgcatgactgtgaaatcattcatggagacattaaaccagacaatttcatacttggaaacggatttttggaacaggatgatgaagatgatttatctgctggcttggcactgattgacctgggtcagagtatagatatgaaactttttccaaaaggaactatattcacagcaaagtgtgaaacatctggttttcagtgtgttgagatgctcagcaacaaaccatggaactaccagatcgattactttggggttgctgcaacagtatattgcatgctctttggcacttacatgaaagtgaaaaatgaaggaggagagtgtaagcctgaaggtctttttagaaggcttcctcatttggatatgtggaatgaattttttca

SEQ ID NO: 930 - DNA, 3486 bp, Homo sapiens
gagccgactgcggctgcgcggggtattcgaatcggcggcggcttctagtttgcggttcaggtttggccgctgccggccagcgtcctctggccatggacaccccggaaaatgtccttcagatgcttgaagcccacatgcagagctacaagggcaatgaccctcttggtgaatgggaaagatacatacagtgggtagaagagaattttcctgagaataaagaatacttgataactttactagaacatttaatgaaggaatttttagataagaagaaataccacaatgacccaagattcatcagttattgtttaaaatttgctgagtacaacagtgacctccatcaattttttgagtttctgtacaaccatgggattggaaccctgtcatcccctctgtacattgcctgggcggggcatctggaagcccaaggagagctgcagcatgccagtgctgtccttcagagaggaattcaaaaccaggctgaacccagagagttcctgcaacaacaatacaggttatttcagacacgcctcactgaaacccatttgccagctcaagctagaacctcagaacctctgcataatgttcaggttttaaatcaaatgataacatcaaaatcaaatccaggaaataacatggcctgcatttctaagaatcagggttcagagctttctggagtgatatcttcagcttgtgataaagagtcaaatatggaacgaagagtgatcacgatttctaaatcagaatattctgtgcactcatctttggcatccaaagttgatgttgagcaggttgttatgtattgcaaggagaagcttattcgtggggaatcagaattttcctttgaagaattgagagcccagaaatacaatcaacggagaaagcatgagcaatgggtaaatgaagacagacattatatgaaaaggaaagaagcaaatgcttttgaagaacagctattaaaacagaaaatggatgaacttcataagaagttgcatcaggtggtggagacatcccatgaggatctgcccgcttcccaggaaaggtccgaggttaatccagcacgtatggggccaagtgtaggctcccagcaggaactgagagcgccatgtcttccagtaacctatcagcagacaccagtgaacatggaaaagaacccaagagaggcacctcctgttgttcctcctttggcaaatgctatttctgcagctttggtgtccccagccaccagccagagcattgctcctcctgttcctttgaaagcccagacagtaacagactccatgtttgcagtggccagcaaagatgctggatgtgtgaataagagtactcatgaattcaagccacagagtggagcagagatcaaagaagggtgtgaaacacataaggttgccaacacaagttcttttcacacaactccaaacacatcactgggaatggttcaggcaacgccatccaaagtgcagccatcacccaccgtgcacacaaaagaagcattaggtttcatcatgaatatgtttcaggctcctacacttcctgatatttctgatgacaaagatgaatggcaatctctagatcaaaatgaagatgcatttgaagcccagtttcaaaaaaatgtaaggtcatctggggcttggggagtcaataagatcatctcttctttgtcatctgcttttcatgtgtttgaagatggaaacaaagaaaattatggattaccacagcctaaaaataaacccacaggagccaggacctttggagaacgctctgtcagcagacttccttcaaaaccaaaggaggaagtgcctcatgctgaagagtttttggatgactcaactgtatggggtattcgctgcaacaaaaccctggcacccagtcctaagagcccaggagacttcacatctgctgcacaacttgcgtctacaccattccacaagcttccagtggagtcagtgcacattttagaagataaagaaaatgtggtagcaaaacagtgtacccaggcgactttggattcttgtgaggaaaacatggtggtgccttcaagggatggaaaattcagtccaattcaagagaaaagcccaaaacaggccttgtcgtctcacatgtattcagcatccttacttcgtctgagccagcctgctgcaggtggggtacttacctgtgaggcagagttgggcgttgaggcttgcagactcacagacactgacgctgccattgcagaagatccaccagatgctattgctgggctccaagcagaatggatgcagatgagttcacttgggactgttgatgctccaaacttcattgttgggaacccatgggatgataagctgattttcaaacttttatctgggctttctaaaccagtgagttcctatccaaatacttttgaatggcaatgtaaacttccagccatcaagcccaagactgaatttcaattgggttctaagctggtctatgtccatcaccttcttggagaaggagcctttgcccaggtgtacgaagctacccagggagatctgaatgatgctaaaaataaacagaaatttgttttaaaggtccaaaagcctgccaacccctgggaattctacattgggacccagttgatggaaagactaaagccatctatgcagcacatgtttatgaagttctattctgcccacttattccagaatggcagtgtattagtaggagagctctacagctatggaacattattaaatgccattaacctctataaaaatacccctgaaaaagtgatgcctcaaggtcttgtcatctcttttgctatgagaatgctttacatgattgagcaagtgcatgactgtgaaatcattcatggagacattaaaccagacaatttcatacttggaaacggatttttggaacaggatgatgaagatgatttatctgctggcttggcactgattgacctgggtcagagtatagatatgaaactttttccaaaaggaactatattcacagcaaagtgtgaaacatctggttttcagtgtgttgagatgctcagcaacaaaccatggaactaccagatcgattactttggggttgctgcaacagtatattgcatgctctttggcacttacatgaaagtgaaaaatgaaggaggagagtgtaagcctgaaggtctttttagaaggcttcctcatttggatatgtggaatgaattttttcatgttatgttgaatattccagattgtcatcatcttccatctttggatttgttaaggcaaaagctgaagaaagtatttcaacaacactatactaacaagattagggccctacgtaataggctaattgtactgctcttagaatgtaagcgttcacgaaaataaaatttggatatagacagtccttaaaaatcacactgtaaatatgaatctgctcactttaaacctgtttttttttcatttattgtttatgtaaatgtttgttaaaaataaatcccatggaatatttccatgtaaaaaa

SEQ ID NO: 931 - DNA, 322 bp, Homo sapiens
tttgaggaatacagataaatttattagttaaatactgattttccagccatttcaccttaagacaatgttaacaggtttgtgggttatggagggtatacgagggggcctttggaagaaaacaatgtaaatgatgattaaaacagaatcttggttcaaaggtattctctgctacagccagtaggattttggagtgaggggtctgggcgtgtggggaggcgtagtaatgccacagtcagctacagctctgctgagaaagaggaaggagtctccttgagctccagcatcaggggcagaaacagcaatgtgcagaggagaacgcggc

SEQ ID NO: 932 - DNA, 424 bp, Homo sapiens
gcccgaatgacggcatctgtttgccatgtacctggatgtgacgggcccctggggacaggcccttgccccatccatccgcttgaggcatggcaccgccatgcatccctaataccaaatctgactccaaaactgtggggtgtgacacacaagtgactgaacacttcctggggagctacaggggcacttaacccaccacagcgcacctcatcaaaatgcagctggcaacttctcccccaggtgccttccccctgctgccggcctttgctccttcacttccaacatctctcaaaataaaaatccctcttcccgctctgagcgattcagctctgcccgcagcttgtacatgtctctcccctggcaaaacaagagctgggtagtttagccaaacggcaccccctcgagttcactgcagacccttcgttca

SEQ ID NO: 933 - DNA, 3372 bp, Homo sapiens
gtcgccgctgcagctccgggggctcccaggggagcgtgcgcggaacctccaggcccagcaggaccccggctgcggcgaggaggaaggagccagcctagcagcttctgcgcctgtggccgcgggtgtcctggaggcctctcggtgtgacgagtgggggacccgaaggctcgtgcgccacctccaggcctggacgctgccctccgtcttctgcccccaataggtgcgccggaccttcaggccctggggtgaattcagctgctcctacatcagcttccggaaccaccaaaaattcaaattgggattttccggagtaaacaagagcctagagccctttgctcaatgctggatttaatacgtatatatttttaagcgagttggttttttcccctttgatttttgatcttcgcgacagttcctcccacgcatattatcgttgttgccgtcgttttctctccccgcgtggctccttgacctgcgagggagagagaggacaccgaagccgggagctcgcagggaccatgtatcagagcttggccatggccgccaaccacgggccgccccccggtgcctacgaggcgggcggccccggcgccttcatgcacggcgcgggcgccgcgtcctcgccagtctacgtgcccacaccgcgggtgccctcctccgtgctgggcctgtcctacctccagggcggaggcgcgggctctgcgtccggaggcgcctcgggcggcagctccggtggggccgcgtctggtgcggggcccgggacccagcagggcagcccgggatggagccaggcgggagccgacggagccgcttacaccccgccgccggtgtcgccgcgcttctccttcccggggaccaccgggtccctggcggccgccgccgccgctgccgcggcccgggaagctgcggcctacagcagtggcggcggagcggcgggtgcgggcctggcgggccgcgagcagtacgggcgcgccggcttcgcgggctcctactccagcccctacccggcttacatggccgacgtgggcgcgtcctgggccgcagccgccgccgcctccgccggccccttcgacagcccggtcctgcacagcctgcccggccgggccaacccggccgcccgacaccccaatctcgatatgtttgacgacttctcagaaggcagagagtgtgtcaactgtggggctatgtccaccccgctctggaggcgagatgggacgggtcactatctgtgcaacgcctgcggcctctaccacaagatgaacggcatcaaccggccgctcatcaagcctcagcgccggctgtccgcctcccgccgagtgggcctctcctgtgccaactgccagaccaccaccaccacgctgtggcgccgcaatgcggagggcgagcctgtgtgcaatgcctgcggcctctacatgaagctccacggggtacccaggcctcttgcaatgcggaaagaggggatccaaaccagaaaacggaagcccaagaacctgaataaatctaagacaccagcagctccttcaggcagtgagagccttcctcccgccagcggtgcttccagcaactccagcaacgccaccaccagcagcagcgaggagatgcgtcccatcaagacggagcctggcctgtcatctcactacgggcacagcagctccgtgtcccagacgttctcagtcagtgcgatgtctggccatgggccctccatccaccctgtcctctcggccctgaagctctccccacaaggctatgcgtctcccgtcagccagtctccacagaccagctccaagcaggactcttggaacagcctggtcttggccgacagtcacggggacataatcactgcgtaatcttccctcttccctcctcaaattcctgcacggacctgggacttggaggatagcaaagaaggaggccctgggctcccaggggccggcctcctctgcctggtaatgactccagaacaacaactgggaagaaacttgaagtcgacaatctggttaggggaagcgggtgttggattttctcagatgcctttacacgctgatgggactggagggagcccacccttcagcacgagcacactgcatctctcctgtgagttggagacttctttcccaagatgtccttgtcccctgcgttccccactgtggcctagaccgtgggttttgcattgtgtttctagcaccgaggatctgagaacaagcggagggccgggccctgggacccctgctccagcccgaatgacggcatctgtttgccatgtacctggatgcgacgggcccctggggacaggcccttgccccatccatccgcttgaggcatggcaccgccctgcatccctaataccaaatctgactccaaaattgtggggtgtgacatacaagtgactgaacacttcctggggagctacaggggcacttaacccaccacagcacagcctcatcaaaatgcagctggcaacttctcccccaggtgccttccccctgctgccggcctttgctccttcacttccaacatctctcaaaataaaaatccctcttcccgctctgagcgattcagctctgcccgcagcttgtacatgtctctcccctggcaaaacaagagctgggtagtttagccaaacggcaccccctcgagttcactgcagacccttcgttcaccgtgtcacacatagaggggttctgagtaagaacaaaacgttctgctgctcaagccagtctggcaagcactcagcccagcctcgaggtccttctggggagagtgtaagtggacagagtcctggtcagggggcaggagtgtcccaagggctggcccacctgctgtctgtctgctcctcctagcccttggtcagatggcagccagagtccctcaggacctgcagcctcgccccggcagaagtcttttgtccaggaggcaaaaagccagagattctgcaacacgaattcgaagcaaacaaacacaacacaacagaattcctggaaagaagacgactgctaagacacggcaggggggcctggagggagcctccgactctgagctgctccgggatctgccgcgttctcctctgcacattgctgtttctgcccctgatgctggagctcaaggagactccttcctctttctcagcagagctgtagctgactgtggcattactacgcctccccacacgcccagacccctcactccaaaatcctactggctgtagcagagaatacctttgaaccaagattctgttttaatcatcatttacattgttttcttccaaaggccccctcgtataccctccctaacccacaaacctgttaacattgtcttaaggtgaaatggctggaaaatcagtatttaactaataaatttatctgtattcctctt

SEQ ID NO: 934 - DNA, 406 bp, Homo sapiens
attacaaagggcttatgatgattttattggctgccagaggaacacagtaaataactcccaggtgtcttgttggaaattaatcatgtggaaattatcacttctttggtgcaataatgccttccagttgggccttcagctgctgatttgttcgcttcaggaactgaatctcctcattgtgcttcttctcctccacctgccgcctctcgctctcccgcttctcagtggcttcacattttgccttctgctcgttcacttgcctctccaggtctctcttttccgtctccaattctgcgattttcctctccatgtctgacttcccctgctcagcctgcagtgccttcctcatgccaaacgccacgctgctctcgtacagggtctggtaggcagcgatggtcatgcggatctc

SEQ ID NO: 935 - DNA, 495 bp, Homo sapiens
ccgcccgcagactctttgctcaagtacgacaccccagtgctggtgagccggaacacggagaaacggagccccaaggtcggctactgaaagtcagcccccagcagcctggaccttcaggttcagccccacagccacccaagaccaagctcccctcaactccctgtgtcccagatcctacaaagcaggcagaagaaatcttgaatgccatactacccccaagggagtgggtggaagacacgcagctatggatccagcaggtgtccagcacccctagcaccaggatggacgtggtgcacctccaggagcagttagacttaaagctgcagcagcggcaggccagggaaacaggcatctgccctgtccgcagggaactctactcacagtgttttgatgagttgatccgggaggtcaccatcaactgtgcggagagggggctgctgctgctgcgagtccgggacgagatccgcatgaccatcgctgcctaccagaccctgt

SEQ ID NO: 936 - DNA, 2663 bp, Homo sapiens
ggcggtttccatggtgacggcaaacaaggcccacactggacagggcagctgctgggttgctactctcgcctccgccatgattccgcccgcagactctttgctcaagtacgacaccccagtgctggtgagccggaacacggagaaacggagccccaaggctcggctactgaaagtcagcccccagcagcctggaccttcaggttcagccccacagccacccaagaccaagctcccctcaactccctgtgtcccagatcctacaaagcaggcagaagaaatcttgaatgccatactacccccaagggagtgggtggaagacacgcagctatggatccagcaggtgtccagcacccctagcaccaggatggacgtggtgcacctccaggagcagttagacttaaagctgcagcagcggcaggccagggaaacaggcatctgccctgtccgcagggaactctactcacagtgttttgatgagttgatccgggaggtcaccatcaactgtgcggagagggggctgctgctgctgcgagtccgggacgagatccgcatgaccatcgctgcctaccagaccctgtacgagagcagcgtggcgtttggcatgaggaaggcactgcaggctgagcaggggaagtcagacatggagaggaaaatcgcagaattggagacggaaaagagagacctggagaggcaagtgaacgagcagaaggcaaaatgtgaagccactgagaagcgggagagcgagaggcggcaggtggaggagaagaagcacaatgaggagattcagttcctgaagcgaacaaatcagcagctgaaggcccaactggaaggcattattgcaccaaagaagtgataatttccacatgattaatttccaacaagacacttgggagttatttactgtgttcctctggcagccaataaaatcatcataagccctttgtaataaaaagctagtttcctgagtgaacaagccataacctcccctaaacaccacctaggtatttgttagaagtcacactattactccaatgtcatcagacacctaaggtctgccagccaggctcctggctgggcaatggaagatggtgtggccctgttagtctccgtgtgtggcttactagccagccttgggaactgccaactcaaattctaagaaagccactgctttctcatcatcactctataccaatacttatttctggccaaatgaatctgcttctctgcccctcaaacttttagttcacaattcatcttctaccttaacttgggcttcttgggcctctggccttccttacttaatgtcttcttttccctactctaatgcatttctaactcactttggagctttggttttctaatgtattatccccacttgccagtcaactggaccccttcctcctcggtttcagactgcctacattaggaaacaatggcagtcaaacccatggctttggagaaagtaaatgtttgccagaaaggaatactagtcacagtggcctttgtgagttgtctgcaactcagctcttcccccagcacagatctgttccccttatcctgcagaaaatcaagccctgactctgcactccccgaagtagtgatgttaattaacaactgaagaggtaactaaatctcacatgcaggtctaatgactaataattggagtacggctgctagacaactgcattttagtatttctcttccattctcctggttttgtagacccagaagattgaatgagtgacataaatctttagttcggggcaagccagggtgggctagggtggtaagctggaggacttcatccttcagttaggctgcacaagtaacattacctaaaaggcactaacatgctcaggttccccagaaagaggcgtaagaagggcctctccttagcagagcttccacctgccatccgtcttgggttcagtgagcttcaaggctcacaatggaagcactgtcatttccccagaaaagctgtgttccctatgctgaacacaccatacacattctcatctggaatctaaggagcagcttttaccctgatccagtatcctgaggaattttaagcctccactcaaatgacctgcctgtgttgtcatttccatgggaaagaactctttccacgagatctgctagttccaggcctctaagacaggaacgtatgtgccataagtgggtctacttcacagactcaatgaggcagaaattattgtagttttctcctatttcttctgcacccaactttctccttgtatttcaaaggccaggccatgtacactaacgtccttgaaatttgcagttctgtatgcttctattccaaatcattcattaccaataaaaacgaaataccaccctttccattttatagacctcatcccctatttctgtcagacagttatatgacagggtgactgtggaacctcttagttcatccaaagtctacctgaagtgctagactttcagactcttatcactgaaatccttaaggttgaggaggctttatttccctagcactggtgaagggcttcaactgtcaaacctcagaacaaatgcattagggccttagaaatgtcaatggggcaggaagaaaacacaatttctaactgcctgtttttgtataatttaataaaaaccttttaaacattaaaaaaaaaaaaaaa

SEQ ID NO: 937 - DNA, 469 bp, Homo sapiens
tttaactatgtgttttgaaaactactgccttctcagcccgaaaatcgccgtctctctcaggctcactgtggtttcctttttctgacacaaaggcaggcacaggctgcccctccacatgtcttggggatcagatcatgccccgggctcataggaaccgaaactttggggcatctgagactggctgattcagattcaaagacaatcacacggaaagactgtgggcagagaaggcaatgctctcccctggtccctttgctgtcactattacataatggacttgcacttttcctccctgcacttatcactttctgggcttgaccttaattgtaagtgtggtatgagtctgtttccatttaaagcagacagaaagaaactactctggacctgaaaacaacgtgacttgccaattattagaattttctagttgaaaggcatagatcagccaatagatccacaccaacaagttgca

SEQ ID NO: 938 - DNA, 4465 bp, Homo sapiens
cctgcagcctccggagtcagtgccgcgcgcccgccgccccgcgccttcctgctcgccgcacctccgggagccggggcgcacccagcccgcagcgccgcctccccgcccgcgccgcctccgaccgcaggccgagggccgccactggccggggggaccgggcagcagcttgcggccgcggagccgggcaacgctggggactgcgccttttgtccccggaggtccctggaagtttgcggcaggacgcgcgcggggaggcggcggaggcagccccgacgtcgcggagaacagggcgcagagccggcatgggcatcgggcgcagcgaggggggccgccgcggggcagccctgggcgtgctgctggcgctgggcgcggcgcttctggccgtgggctcggccagcgagtacgactacgtgagcttccagtcggacatcggcccgtaccagagcgggcgcttctacaccaagccacctcagtgcgtggacatccccgcggacctgcggctgtgccacaacgtgggctacaagaagatggtgctgcccaacctgctggagcacgagaccatggcggaggtgaagcagcaggccagcagctgggtgcccctgctcaacaagaactgccacgccggcacccaggtcttcctctgctcgctcttcgcgcccgtctgcctggaccggcccatctacccgtgtcgctggctctgcgaggccgtgcgcgactcgtgcgagccggtcatgcagttcttcggcttctactggcccgagatgcttaagtgtgacaagttccccgagggggacgtctgcatcgccatgacgccgcccaatgccaccgaagcctccaagccccaaggcacaacggtgtgtcctccctgtgacaacgagttgaaatctgaggccatcattgaacatctctgtgccagcgagtttgcactgaggatgaaaataaaagaagtgaaaaaagaaaatggcgacaagaagattgtccccaagaagaagaagcccctgaagttggggcccatcaagaagaaggacctgaagaagcttgtgctgtacctgaagaatggggctgactgtccctgccaccagctggacaacctcagccaccacttcctcatcatgggccgcaaggtgaagagccagtacttgctgacggccatccacaagtgggacaagaaaaacaaggagttcaaaaacttcatgaagaaaatgaaaaaccatgagtgccccacctttcagtccgtgtttaagtgattctcccgggggcagggtggggagggagcctcgggtggggtgggagcgggggggacagtgccccgggaacccggtgggtcacacacacgcactgcgcctgtcagtagtggacattgtaatccagtcggcttgttcttgcagcattcccgctcccttccctccatagccacgctccaaaccccagggtagccatggccgggtaaagcaagggccatttagattaggaaggtttttaagatccgcaatgtggagcagcagccactgcacaggaggaggtgacaaaccatttccaacagcaacacagccactaaaacacaaaaagggggattgggcggaaagtgagagccagcagcaaaaactacattttgcaacttgttggtgtggatctattggctgatctatgcctttcaactagaaaattctaatgattggcaagtcacgttgttttcaggtccagagtagtttctttctgtctgctttaaatggaaacagactcataccacacttacaattaaggtcaagcccagaaagtgataagtgcagggaggaaaagtgcaagtccattatgtaatagtgacagcaaagggaccaggggagaggcattgccttctctgcccacagtctttccgtgtgattgtctttgaatctgaatcagccagtctcagatgccccaaagtttcggttcctatgagcccggggcatgatctgatccccaagacatgtggaggggcagcctgtgcctgcctttgtgtcagaaaaaggaaaccacagtgagcctgagagagacggcgattttcgggctgagaaggcagtagttttcaaaacacatagttaaaaaagaaacaaatgaaaaaaattttagaacagtccagcaaattgctagtcagggtgaattgtgaaattgggtgaagagcttaggattctaatctcatgttttttccttttcacatttttaaaagaacaatgacaaacacccacttatttttcaaggttttaaaacagtctacattgagcatttgaaaggtgtgctagaacaaggtctcctgatccgtccgaggctgcttcccagaggagcagctctccccaggcatttgccaagggaggcggatttccctggtagtgtagctgtgtggctttccttcctgaagagtccgtggttgccctagaacctaacaccccctagcaaaactcacagagctttccgtttttttctttcctgtaaagaaacatttcctttgaacttgattgcctatggatcaaagaaattcagaacagcctgcctgtccccccgcactttttacatatatttgtttcatttctgcagatggaaagttgacatgggtggggtgtccccatccagcgagagagtttcaaaagcaaaacatctctgcagtttttcccaagtaccctgagatacttcccaaagcccttatgtttaatcagcgatgtatataagccagttcacttagacaactttacccttcttgtccaatgtacaggaagtagttctaaaaaaaatgcatattaatttcttcccccaaagccggattcttaattctctgcaacactttgaggacatttatgattgtccctctgggccaatgcttatacccagtgaggatgctgcagtgaggctgtaaagtggccccctgcggccctagcctgacccggaggaaaggatggtagattctgttaactcttgaagactccagtatgaaaatcagcatgcccgcctagttacctaccggagagttatcctgataaattaacctctcacagttagtgatcctgtccttttaacaccttttttgtggggttctctctgacctttcatcgtaaagtgctggggaccttaagtgatttgcctgtaattttggatgattaaaaaatgtgtatatatattagctaattagaaatattctacttctctgttgtcaaactgaaattcagagcaagttcctgagtgcgtggatctgggtcttagttctggttgattcactcaagagttcagtgctcatacgtatctgctcattttgacaaagtgcctcatgcaaccgggccctctctctgcggcagagtccttagtggaggggtttacctggaacattagtagttaccacagaatacggaagagcaggtgactgtgctgtgcagctctctaaatgggaattctcaggtaggaagcaacagcttcagaaagagctcaaaataaattggaaatgtgaatcgcagctgtgggttttaccaccgtctgtctcagagtcccaggaccttgagtgtcattagttactttattgaaggttttagacccatagcagctttgtctctgtcacatcagcaatttcagaaccaaaagggaggctctctgtaggcacagagctgcactatcacgagcctttgtttttctccacaaagtatctaacaaaaccaatgtgcagactgattggcctggtcattggtctccgagagaggaggtttgcctgtgatttcctaattatcgctagggccaaggtgggatttgtaaagctttacaataatcattctggatagagtcctgggaggtccttggcagaactcagttaaatctttgaagaatatttgtagttatcttagaagatagcatgggaggtgaggattccaaaaacattttatttttaaaatatcctgtgtaacacttggctcttggtacctgtgggttagcatcaagttctccccagggtagaattcaatcagagctccagtttgcatttggatgtgtaaattacagtaatcccatttcccaaacctaaaatctgtttttctcatcagactctgagtaactggttgctgtgtcataacttcatagatgcaggaggctcaggtgatctgtttgaggagagcaccctaggcagcctgcagggaataacatactggccgttctgacctgttgccagcagatacacaggacatggatgaaattcccgtttcctctagtttcttcctgtagtactcctcttttagatcctaagtctcttacaaaagctttgaatactgtgaaaatgttttacattccatttcatttgtgttgtttttttaactgcattttaccagatgttttgatgttatcgcttatgttaatagtaattcccgtacgtgttcattttattttcatgctttttcagccatgtatcaatattcacttgactaaaatcactcaattaatcaatgaaaaaaaaaaa

SEQ ID NO: 939 - DNA, 417 bp, Homo sapiens
tttgaaatgtaagtatacagattttaatttatttttaagaataattgtatattttaaaaacaggacacgtactgtatgagtaaacagcgtggctaacaccaagtccacactggtaagcttttgagaaccatttacactatgttgacagtagtactgctgcaggcagacagaggaagaataaataatagtgcttcaagaagagtagtgattgagaggataggtaaagagggcgcctcatcgtggaagctagagcaggaacacctccccagtagtgacatgtgcaaagttccagatctccacgacaaagacagctcaacccattggaacaaacagactcccaatgtggctggcaactgcgggggtagaagaactcaggcaaagtaggcatacaaagaatttcgcacagttcttgatctt

SEQ ID NO: 940 - DNA, 371 bp, Homo sapiens
attcggcacacggggagtgacatcgccggtgtttgcgggtggttgttgctctcggggccgtgtggagtaggtctggacctggactcacggctgcttggagcgtccgccatgaggagaagtgaggtgctggcggaggagtccatagtatgtctgcagaaagccctaaatcaccttcgggaaatatgggagctaattgggattccagaggaccagcggttacaaagaactgaggtggtaaagaagcatatcaaggaactcctggatatgatgattgctgaagaggaaagcctgaaggaaagactcatcaaaagcatatccgtctgtcagaaagagctgaacactctgtgcagcgagttacatgttgagccatt

SEQ ID NO: 941 - DNA, 466 bp, Homo sapiens
ttttttaatgttttttaaatggagtttattcttagcacatggctttctatgtagccacatcacaatttgtacagttccacataagtctaaatgcactcccctctccccaaagaccgtgccccagaaggtgacaacagtatctctgtaacagtgtcttaaataaatgcaagtaagaaaaactaacatgtcacacctaccatcaaggtctacacatcttaagaattaaataatcttgtgaggtccacaatgtctactcatttattcagttaaatacaagcttggatgagctgccttaatgggggaagaggaggtaaggaaggtggggaaagggtctgtcttcttctgctttcaacaaagatgcaagtgtatgtccccagtcagcatgggctgtccagctagctgactgtagccatctcaaaagtatttgataccaagtagtccttctcaggtatccacacctggcagc

SEQ ID NO: 942 - DNA, 424 bp, Homo sapiens
attccccacccgagcacctccacacccgttccctcctccatataatcttctagagatcttaaccagtttctatcccttacctgcttttctcttctcttctcctgctccgttcctcatccacccctccccatctggaccataatagacaccaaaacaaacccaaattggtaaaaagaataatcaaaaagaagacattatccggttaagagtctgtgctggttgccacccaagagagaacagttgtccaggatgctggctggtggaacaacctgctggcccgaaacaaggctgccaggtgtggatacctgagaaggactacttggtatcaaatacttttgagatggctacagtcagctagctggacagcccatgctgactggggacatacacttgcatctttgttgaaagcagaagaagacagacc

SEQ ID NO: 943 - DNA, 1784 bp, Homo sapiens
aaaacgacaacgcgagaaaaattagtatttttgcacttcacaaattaatgaccatgagctcgtttttgataaactccaactacatcgagcccaagttccctcccttcgaggagtacgcgcagcacagcggctcgggcggcgcagacggcggcccgggcgggggccccggctaccagcagcccccagcgcccccgacccagcacctgccgctgcagcagccccagctccctcacgcgggcggcggccgagagccccctgcctcctactacgcgccgcggaccgcccgcgagcccgcctaccctgctgccgcgctgtaccccgcgcatggggccgcggacaccgcctacccctatggctaccgcggcggcgccagccccgggcggccgccccagcccgagcagcccccggcgcaagccaagggcccagcgcacggcctgcatgcgagccacgtcctgcagccccagccgccgccgcccctgcagcctcgcgccgtgcccccagcggccccgcggcgctgcgaggcggcccccgccaccccaggcgtcccggcagggggcagcgcccccgcgtgcccgctgctcttggccgacaagagcccgctgggcctgaagggcaaggagcccgtggtgtacccctggatgaagaagatccatgtcagcgccgttaaccccagttataacggaggggagcctaagcgctctcgaaccgcctacacccggcagcaggtcttggagctggagaaggagttccacttcaatcgctacctgacccggcggcgccgcatcgagatcgcccacacgctctgtttgtctgagcgccaggtcaagatctggtttcagaaccggaggatgaagtggaagaaagaccacaaactgcccaacaccaagatgcgatcctccaattcggcctcggcctctgccggcccaccagggaaagcacaaactcagagcccacacctccatccccacccccacccgagcacctccacacccgttccctcctccatataatcttctagagatcttaaccagtttctatcccttacctgcttttctcttctcttctcctgctccgttcctcatccacccctccccatctggaccataatagacaccaaaacaaacccaaattggtaaaaagaataatcaaaaagaagacattatccggttaagagtctgtgctggttgccacccaagagagaacagttgtccaggatgctggctggtggaacaacctgctggcccgaaacaaggctgccaggtgtggaacagcccatgctgactggggacatacacttgcatctttgttgaaagcagaagaagacagaccctttccccaccttccttacctcctcttcccccattaaggcagctcatccaagcttgtatttaactgaataaatgagtagacattgtggacctcacaagattatttaattcttaagatgtgtagaccttgatggtaggtgtgacatgttagtttttcttacttgcatttatttaagacactgttacagagatactgttgtcaccttctggggcacggtctttggggagaggggagtgcatttagacttatgtggaactgtacaaattgtgatgtggctacatagaaagccatgtgctaagaataaactccatttaaaaaacattaaaaatctaagattcatgtgttttctaagcttttcattaagaaaacaaaagtcctctggattgagatacttgaccttgcatgtaaaaaccttgtagatagcttgagctggattcacttggattctgacggct

SEQ ID NO: 944 - DNA, 350 bp, Homo sapiens
  modified_base (178)..(178): a, c, t or g
  modified_base (181)..(181): a, c, t or g
  modified_base (330)..(330): a, c, t or g
gtgcagaaccaaggggagaggggacggcccatcgccaatctgtcccagccccccggggtcagatgcaaaatacaaaaagagaaccacaagtacagcatggggtaggggggtcggggattcattgaattgtggttggcaggagcaagccctgctcacactctcacactcgcacccaganttntcaaagatacagattgtaaaaatctacgatccctcagtctcactcacaaaaaataaaatctcatgtccccaacgaacccagagtcagacgacagctggagcattggcaggggacagtcagaaaggagacaagttgaaaccggtcagatnggaccacaggccggagggag

SEQ ID NO: 945 - DNA, 106 bp, Homo sapiens
aaacttgcttctagaaactctggctcagcttgtctcgggctgacccttttctgatcgtctcggcccctctgattgttcccgatggtctctctccctctgtcttttc

SEQ ID NO: 946 - DNA, 3775 bp, Homo sapiens
cattcataagactcagagctacggccacggcagggacacgcggaaccaagacttggaaacttgattgttgtggttcttcttgggggttatgaaatttcattaatcttttttttttccggggagaaagtttttggaaagattcttccagatatttcttcattttcttttggaggaccgacttactttttttggtcttctttattactcccctccccccgtgggacccgccggacgcgtggaggagaccgtagctgaagctgattctgtacagcgggacagcgctttctgcccctgggggagcaacccctccctcgcccctgggtcctacggagcctgcactttcaagaggtacagcggcatcctgtgggggcctgggcaccgcaggaagactgcacagaaactttgccattgttggaacgggacgttgctccttccccgagcttccccggacagcgtactttgaggactcgctcagctcaccggggactcccacggctcaccccggacttgcaccttacttccccaacccggccatagccttggcttcccggcgacctcagcgtggtcacaggggcccccctgtgcccagggaaatgtttcaggctttccccggagactacgactccggctcccggtgcagctcctcaccctctgccgagtctcaatatctgtcttcggtggactccttcggcagtccacccaccgccgcggcctcccaggagtgcgccggtctcggggaaatgcccggttccttcgtgcccacggtcaccgcgatcacaaccagccaggacctccagtggcttgtgcaacccaccctcatctcttccatggcccagtcccaggggcagccactggcctcccagcccccggtcgtcgacccctacgacatgccgggaaccagctactccacaccaggcatgagtggctacagcagtggcggagcgagtggcagtggtgggccttccaccagcggaactaccagtgggcctgggcctgcccgcccagcccgagcccggcctaggagaccccgagaggagacgctcaccccagaggaagaggagaagcgaagggtgcgccgggaacgaaataaactagcagcagctaaatgcaggaaccggcggagggagctgaccgaccgactccaggcggagacagatcagttggaggaagaaaaagcagagctggagtcggagatcgccgagctccaaaaggagaaggaacgtctggagtttgtgctggtggcccacaaaccgggctgcaagatcccctacgaagaggggcccgggccgggcccgctggcggaggtgagagatttgccgggctcagcaccggctaaggaagatggcttcagctggctgctgccgcccccgccaccaccgcccctgcccttccagaccagccaagacgcaccccccaacctgacggcttctctctttacacacagtgaagttcaagtcctcggcgaccccttccccgttgttaacccttcgtacacttcttcgtttgtcctcacctgcccggaggtctccgcgttcgccggcgcccaacgcaccagcggcagtgaccagccttccgatcccctgaactcgccctccctcctcgctcggtgaactctttagacacacaaaacaaacaaacacatgggggagagagacttggaagaggaggaggaggaggagaaggaggagagagaggggaagagacaaagtgggtgtgtggcctccctggctcctccgtctgaccctctgcggccactgcgccactgccatcggacaggaggattccttgtgttttgtcctgcctcttgtttctgtgccccggcgaggccggagagctggtgactttggggacagggggtgggaaggggatggacacccccagctgactgttggctctctgacgtcaacccaagctctggggatgggtggggaggggggcgggtgacgcccaccttcgggcagtcctgtgtgaggatgaagggacgggggtgggaggtaggctgtggggtgggctggagtcctctccagagaggctcaacaaggaaaaatgccactccctacccaatgtctcccacacccaccctttttttggggtgcccaggttggtttcccctgcactcccgaccttagcttattgatcccacatttccatggtgtgagatcctctttactctgggcagaagtgagcccccccttaaagggaattcgatgcccccctagaataatctcatccccccacccgacttcttttgaaatgtgaacgtccttccttgactgtctagccactccctcccagaaaaactggctctgattggaatttctggcctcctaaggctccccaccccgaaatcagcccccagccttgtttctgatgacagtgttatcccaagaccctgccccctgccagccgaccctcctggccttcctcgttgggccgctctgatttcaggcagcaggggctgctgtgatgccgtcctgctggagtgatttatactgtgaaatgagttggccagattgtggggtgcagctgggtggggcagcacacctctggggggataatgtccccactcccgaaagcctttcctcggtctcccttccgtccatcccccttcttcctcccctcaacagtgagttagactcaagggggtgacagaaccgagaagggggtgacagtcctccatccacgtggcctctctctctctcctcaggaccctcagccctggcctttttctttaaggtcccccgaccaatccccagcctaggacgccaacttctcccaccccttggcccctcacatcctctccaggaaggcagtgaggggctgtgacatttttccggagaagatttcagagctgaggctttggtacccccaaacccccaatatttttggactggcagactcaaggggctggaatctcatgattccatgcccgagtccgcccatccctgaccatggttttggctctcccaccccgccgttccctgcgcttcatctcatgaggatttctttatgaggcaaatttatattttttaatatcggggggtggaccacgccgccctccatccgtgctgcatgaaaaacattccacgtgccccttgtcgcgcgtctcccatcctgatcccagacccattccttagctatttatccctttcctggtttccgaaaggcaattatatctattatgtataagtaaatatattatatatggatgtgtgtgtgtgcgtgcgcgtgagtgtgtgagcgcttctgcagcctcggcctaggtcacgttggccctcaaagcgagccgttgaattggaaactgcttctagaaactctggctcagcctgtctcgggctgacccttttctgatcgtctcggcccctctgattgttcccgatggtctctctccctctgtcttttctcctccgcctgtgtccatctgaccgttttcacttgtctcctttctgactgtccctgccaatgctccagctgtcgtctgactctgggttcgttggggacatgagattttattttttgtgagtgagactgagggatcgtagatttttacaatctgtatctttgacaattctgggtgcgagtgtgagagtgtgagcagggcttgctcctgccaaccacaattcaatgaatccccgacccccctaccccatgctgtacttgtggttctctttttgtattttgcatctgaccccggggggctgggacagattggcaatgggccgtcccctctccccttggttctgcactgttgccaataaaaagctcttaaaaacgc

SEQ ID NO: 947 - DNA, 530 bp, Homo sapiens
ttttttcagctgtgaactattggatttgagacaggaacagaacaaatcagagggccaggggagggttgtgggggagacagagtggtttaaataggggaggaggggaagttcggtgatgggggagggaggcaggtatttacaagaaggctcagggggccagagctcatcttggaatattttataacaatataaataagattctggtttgcttttccttttcgtctcgtaaaggagagagaagtgcagagttcgattctgtacaagggggcagcggcagaaggccgccgggcgggtcactgggcgtccacccggaaggacagcagcttctcggaatgcatgttgttcagggtccgcagtccggcagcttgagcagcagcaaggtgaagcgggaagtctccaagggccggttcttcagcaccagagcccgaagaagcccgcagcaggttctcctggagctgctccaccgaagcggaattttccatgcccgaagcggtctgccgagacaagcaacaccggcggtgaagaggccc

SEQ ID NO: 948 - DNA, 497 bp, Homo sapiens
taccgaggaggagctgggcctcttcaccgcggtggtgcttgtctctgcagaccgctcgggcatggagaattccgcttcggtggagcagctccaggagacgctgctgcggctcttcgggctctggtgctgaagaaccggcccttggagacttcccgcttcaccaagctgctgctcaagctgccggacctgcggaccctgaacaacatgcattccgagaagctgctgtccttccgggtggacgcccagtgacccgcccggccggccttctgccgctgcccccttgtacagaatcgaactctgcacttctctctcctttacgagacgaaaaggaaaagcaaaccagaatcttatttatattgttataaaatattccaagatgagcctctgatccctgagccttcttgtaaatacctgcctacttgccccatcaccgaacttcccctcctcccctatttaaaccactctgtctcccccacaaccctcccctggccctctga

SEQ ID NO: 949 - DNA, 2768 bp, Homo sapiens
ccgaggcgctccctgggatcacatggtacctgctccagtgccgcgtgcggcccgggaaccctgggctgctggcgcctgcgcagagccctctgtcccagggaaaggctcgggcaaaaggcggctgagattggcagagtgaaatattactgccgagggaacgtagcagggcacacgtctcgcctctttgcgactcggtgccccgtttctccccatcacctacttacttcctggttgcaacctctcttcctctgggacttttgcaccgggagctccagattcgctaccccgcagcgctgcggagccggcaggcagaggcaccccgtacactgcagagacccgaccctccttgctaccttctagccagaactactgcaggctgattccccctacacactctctctgctcttcccatgcaaagcagaactccgttgcctcaacgtccaacccttctgcagggctgcagtccggccaccccaagaccttgctgcagggtgcttcggatcctgatcgtgagtcgcggggtccactccccgcccttagccagtgcccagggggcaacagcggcgatcgcaacctctagtttgagtcaaggtccagtttgaatgaccgctctcagctggtgaagacatgacgaccctggactccaacaacaacacaggtggcgtcatcacctacattggctccagtggctcctccccaagccgcaccagccctgaatccctctatagtgacaactccaatggcagcttccagtccctgacccaaggctgtcccacctacttcccaccatcccccactggctccctcacccaagacccggctcgctcctttgggagcattccacccagcctgagtgatgacggctccccttcttcctcatcttcctcgtcgtcatcctcctcctccttctataatgggagcccccctgggagtctacaagtggccatggaggacagcagccgagtgtcccccagcaagagcaccagcaacatcaccaagctgaatggcatggtgttactgtgtaaagtgtgtggggacgttgcctcgggcttccactacggtgtgcacgcctgcgagggctgcaagggctttttccgtcggagcatccagcagaacatccagtacaaaaggtgtctgaagaatgagaattgctccatcgtccgcatcaatcgcaaccgctgccagcaatgtcgcttcaagaagtgtctctctgtgggcatgtctcgagacgctgtgcgttttgggcgcatccccaaacgagagaagcagcggatgcttgctgagatgcagagtgccatgaacctggccaacaaccagttgagcagccagtgcccgctggagacttcacccacccagcaccccaccccaggccccatgggcccctcgccaccccctgctccggtcccctcacccctggtgggcttctcccagtttccacaacagctgacgcctcccagatccccaagccctgagcccacagtggaggatgtgatatcccaggtggcccgggcccatcgagagatcttcacctacgcccatgacaagctgggcagctcacctggcaacttcaatgccaaccatgcatcaggtagccctccagccaccaccccacatcgctgggaaaatcagggctgcccacctgcccccaatgacaacaacaccttggctgcccagcgtcataacgaggccctaaatggtctgcgccaggctccctcctcctaccctcccacctggcctcctggccctgcacaccacagctgccaccagtccaacagcaacgggcaccgtctatgccccacccacgtgtatgcagccccagaaggcaaggcacctgccaacagtccccggcagggcaactcaaagaatgttctgctggcatgtcctatgaacatgtacccgcatggacgcagtgggcgaacggtgcaggagatctgggaggatttctccatgagcttcacgcccgctgtgcgggaggtggtagagtttgccaaacacatcccgggcttccgtgacctttctcagcatgaccaagtcaccctgcttaaggctggcacctttgaggtgctgatggtgcgctttgcttcgttgttcaacgtgaaggaccagacagtgatgttcctaagccgcaccacctacagcctgcaggagcttggtgccatgggcatgggagacctgctcagtgccatgttcgacttcagcgagaagctcaactccctggcgcttaccgaggaggagctgggcctcttcaccgcggtggtgcttgtctctgcagaccgctcgggcatggagaattccgcttcggtggagcagctccaggagacgctgctgcgggctcttcgggctctggtgctgaagaaccggcccttggagacttcccgcttcaccaagctgctgctcaagctgccggacctgcggaccctgaacaacatgcattccgagaagctgctgtccttccgggtggacgcccagtgacccgcccggccggccttctgccgctgcccccttgtacagaatcgaactctgcacttctctctcctttacgagacgaaaaggaaaagcaaaccagaatcttatttatattgttataaaatattccaagatgagcctctggccccctgagccttcttgtaaatacctgcctccctcccccatcaccgaacttcccctcctcccctatttaaaccactctgtctcccccacaaccctcccctggccctctgatttgttctgttcctgtctcaaatccaatagttcacagctgagctggg

SEQ ID NO: 950 - DNA, 514 bp, Homo sapiens
gtatttcagtaaatttatttttttcaatcttcagatataagaaggcttttccatgaaaaacactctatttatgtctcactatttaattatctaatgttatataaatagtcacatacagaatgaagaatcagagccaggcacattatagaaaagaatctgtgacttcctaatcttgccatgagtagcaagttattctaacagtttaatcatggaattattcaaatttgctctgttaacaaattgaagactttcaatcaaatatgtaacattgctgaaatgaagaaatatttccagtataaattggactgaactgataaatcaatgctttctcctcttcagattcagatttaaaatgatggttgtttttccgagcttcattaacaaaaaactctgctaaataaaatgcggttttcacagcattaggtgcatgggaaatgccatccaaattcttccactcataaggtgctttctctgggatgccctggacaccatatactggatacttatatccttc

SEQ ID NO: 951 - DNA, 493 bp, Homo sapiens
aatattttataacttgtccatacagagttttgatgatggagactattttcctgtgtggggcacatgccttggatttgaagagctttcactgctgattagtggagagtgcttattaactgccacagatactgttgacgtggcaatgccgctgaacttcactggaggtcaattgcacagcagaatgttccagaattttcctactgagttgttgctgtcattagcagtagaacctctgactgccaatttccataagtggagcctctccgtgaagaattttacaatgaatgaaaagttaaagaagtttttcaatgtcttaactacaaatacagatggcaagattgagtttatttcaacaatggaaggatataagtatccagtatatggtgtccagtggcatccagagaaagcaccttatgagtggaagaatttggatggcatttcccatgcagctaatgctgtgaaaaccgcattttatttagcagagtttttgtta

SEQ ID NO: 952 - DNA, 1280 bp, Homo sapiens
tgccgcagcccccgcccgcccgcagagcttttgaaaggcggcgggaggcggcgagcgccatggccagtccgggctgcctgctgtgcgtgctgggcctgctactctgcggggcggcgagcctcgagctgtctagaccccacggcgacaccgccaagaagcccatcatcggaatattaatgcaaaaatgccgtaataaagtcatgaaaaactatggaagatactatattgctgcgtcctatgtaaagtacttggagtctgcaggtgcgagagttgtaccagtaaggctggatcttacagagaaagactatgaaatacttttcaaatctattaatggaatccttttccctggaggaagtgttgacctcagacgctcagattatgctaaagtggccaaaatattttataacttgtccatacagagttttgatgatggagactattttcctgtgtggggcacatgccttggatttgaagagctttcactgctgattagtggagagtgcttattaactgccacagatactgttgacgtggcaatgccgctgaacttcactggaggtcaattgcacagcagaatgttccagaattttcctactgagttgttgctgtcattagcagtagaacctctgactgccaatttccataagtggagcctctccgtgaagaattttacaatgaatgaaaagttaaagaagtttttcaatgtcttaactacaaatacagatggcaagattgagtttatttcaacaatggaaggatataagtatccagtatatggtgtccagtggcatccagagaaagcaccttatgagtggaagaatttggatggcatttcccatgcacctaatgctgtgaaaaccgcattttatttagcagagttttttgttaatgaagctcggaaaaacaaccatcattttaaatctgaatctgaagaggagaaagcattgatttatcagttcagtccaatttatactggaaatatttcttcatttcagcaatgttacatatttgattgaaagtcttcaatttgttaacagagcaaatttgaataattccatgattaaactgttagaataacttgctactcatggcaagattaggaagtcacagattcttttctataatgtgcctggctctgattcttcattatgtatgtgactatttatataacattagataattaaatagtgagacataaatagagtgctttttcatggaaaagccttcttatatctgaagattgaaaaataaatttactgaaatacaaaaaaaaaaaaaaa

SEQ ID NO: 953 - DNA, 406 bp, Homo sapiens
gggagaagtgggggcctttattaaggtctggcagatgtggtggaggtggaagtacaaacccaggcctgggcctaggaaagggcagaagaaaggcaaagggtcccttggagcaggaacccatccctctctgcttatacccagcacccctcatcccaggttcctttcttcaacctccgcctgcctctgggaacacagagcaccaagaactgacaaaccgggaccctccagggccacagcgtggggcagagtccaggcttctgtctccccgcagtgggagatctggggagctcagtgaacctcctcaccctcctgccagtatgaagttgggaagcgccttctctgtcccccagaacgaacaaactcttgttctctgtggttggggaaaaggtgtggggggcttggacct

SEQ ID NO: 954 - DNA, 456 bp, Homo sapiens
agcgttacgtgtacaagtttgtgtgtgagcccgaggcctcttctctttggccttcccggacaatcagcgtccagctctcaaggctgagtttgaccggcctgtcagtgaggaggacacagtccctttgtcccacttggatgagagccccgcctacctcccagagctggctggccccgcccagccatttggccccaagggtggctactcttactagcccccagcggctgttccccctgccgcaggtgggtgctgccctgtgtacatataaatgaatctggtgttggggaaaccttcatctgaaacccacagatgtctctggggcagatccccactgtcctaccagttgccctagcccagactctgagctgctcaccggagtcattgggaaggaaaagtggagaaatggcaagtctagagtctcagaaactcccctggggggtttcacctggggccctg

SEQ ID NO: 955 - DNA, 2212 bp, Homo sapiens
gcccggctcctgggagcaggtctcggcccccgcttggggccccggccgtgcggccggagggagcggccggatggagcggaggatgaaagccggatacttggaccagcaagtgccctacaccttcagcagcaaatcgcccggaaatgggagcttgcgcgaagcgctgatcggcccgctggggaagctcatggacccgggctccctgccgcccctcgactctgaagatctcttccaggatctaagtcacttccaggagacgtggctcgctgaagctcaggtaccagacagtgatgagcagtttgttcctgatttccattcagaaaacctagctttccacagccccaccaccaggatcaagaaggagccccagagtccccgcacagacccggccctgtcctgcagcaggaagccgccactcccctaccaccatggcgagcagtgcctttactccagtgcctatgacccccccagacaaatcgccatcaagtcccctgcccctggtgcccttggacagtcgcccctacagccctttccccgggcagagcaacggaatttcctgagatcctctggcacctcccagccccaccctggccatgggtacctcggggaacatagctccgtcttccagcagcccctggacatttgccactccttcacatctcagggagggggccgggaacccctcccagccccctaccaacaccagctgtcggagccctgcccaccctatccccagcagagctttaagcaagaataccatgatcccctgtatgaacaggcgggccagccagccgtggaccagggtggggtcaatgggcacaggtacccaggggcgggggtggtgatcaaacaggaacagacggacttcgcctacgactcagatgtcaccgggtgcgcatcaatgtacctccacacagagggcttctctgggccctctccaggtgacggggccatgggctatggctatgagaaacctctgcgaccattcccagatgatgtctgcgttgtccctgagaaatttgaaggagacatcaagcaggaaggggtcggtgcatttcgagaggggccgccctaccagcgccggggtgccctgcagctgtggcaatttctggtggccttgctggatgacccaacaaatgcccatttcattgcctggacgggccggggaatggagttcaagctcattgagcctgaggaggtcgccaggctctggggcatccagaagaaccggccagccatgaattacgacaagctgagccgctcgctccgatactattatgagaaaggcatcatgcagaaggtggctggtgagcgttacgtgtacaagtttgtgtgtgagcccgaggccctcttctctttggccttcccggacaatcagcgtccagctctcaaggctgagtttgaccggcctgtcagtgaggaggacacagtccctttgtcccacttggatgagagccccgcctacctcccagagctggctggccccgcccagccatttggccccaagggtggctactcttactagcccccagcggctgttccccctgccgcaggtgggtgctgccctgtgtacatataaatgaatctggtgttggggaaaccttcatctgaaacccacagatgtctctggggcagatccccactgtcctaccagttgccctagcccagactctgagctgctcaccggagtcattgggaaggaaaagtggagaaatggcaagtctagagtctcagaaactcccctgggggtttcacctgggccctggaggaattcagctcagcttcttcctaggtccaagccccccacaccttttccccaaccacagagaacaagagtttgttctgttctgggggacagagaaggcgcttcccaacttcatactggcaggagggtgaggaggttcactgagctccccagatctcccactgcggggagacagaagcctggactctgccccacgctgtggccctggagggtaccggtttgtcagttcttggtgctctgtgttcccagaggcaggcggaggttgaagaaaggaacctgggatgaggggtgctgggtataagcagagagggatgggttcctgctccaagggaccctttgcctttcttctgccctttcctaggcccaggcctgggtttgtacttccacctccaccacatctgccagaccttaataaaggcccccacttctcccaaaaaaaaaaaaaaa

SEQ ID NO: 956 - DNA, 501 bp, Homo sapiens
aaataaaattttgttggaatgaagcagcaaattctcacagctgttaaaagaattggactctggcatacctaactggagaataccatgctgttttttctataaaccgctggcattttatgccttttttgtttgttttgtgttgtcaactacaaagtaattctgtaaacagtacagatagccctggactgccaccacgggccaggccagggtagtcaaggttgtccatatgcacatgggcagataacctgttttcctttgacatttttttccaagtcaaattcttggaggattgtgtatttgtattataggaagtccagatcatagacttttaaaactaaaagcatcactgctgaactccagctcagtcttcccattttataatgaggactctgaagtttatagaggtcaaggacttgtccaaagctttagatatgtagtgtctgtgccttttcctcaagtttccctagagaatgtgggggctcagacagagaataaggtgca

SEQ ID NO: 957 - DNA, 648 bp, Homo sapiens
  modified_base (539)..(539): a, c, t or g
aaactaggtaaaatttgttgttggttccttttagaccacggctgccccttccacaccccatcttgctctaatgatcaaaacatgcttgaataactgagcttagagtatacctcctatatgtccatttaagtcaggagagggggcgatatagagactaaggcacaaaattttgtttaaaactcagaatataacatgtaaaatcccatctgctagaagcccatcctgtgccagaggaaggaaaaggaggaaatttcctttctcttttaggaggcacaacagttctcttctaggatttgtttggctgactggcagtaacctagtgaatttttgaaagatgagtaatttctttggcaaccttcctcctcccttactgaaccactctcccacctcctggtggtaccattattatagaagccctctacagcctgactttctctccagcggtccaaagttatcccctcctttacccctcatccaaagttcgcactccttcaggacagctgctgtgcattagatattaggggggaaagtcatctgtntaatttacacacttgcatgaattactggatataactccttaactcagggagctatgtcatttagtgctaacaaagtagaaaaatagctcgagtgagttctaatggtgga

SEQ ID NO: 958 - DNA, 5361 bp, Homo sapiens
ctgcaaacccagcgcaactacggtcccccggtcagacccaggatggggccagaacggacaggggccgcgccgctgccgctgctgctggtgttagcgctcagtcaaggcattttaaattgttgtttggcctacaatgttggtctcccagaagcaaaaatattttccggtccttcaagtgaacagtttgggtatgcagtgcagcagtttataaatccaaaaggcaactggttactggttggttcaccctggagtggctttcctgagaaccgaatgggagatgtgtataaatgtcctgttgacctatccactgccacatgtgaaaaactaaatttgcaaacttcaacaagcattccaaatgttactgagatgaaaaccaacatgagcctcggcttgatcctcaccaggaacatgggaactggaggttttctcacatgtggtcctctgtgggcacagcaatgtgggaatcagtattacacaacgggtgtgtgttctgacatcagtcctgattttcagctctcagccagcttctcacctgcaactcagccctgcccttccctcatagatgttgtggttgtgtgtgatgaatcaaatagtatttatccttgggatgcagtaaagaattttttggaaaaatttgtacaaggccttgatataggccccacaaagacacaggtggggttaattcagtatgccaataatccaagagttgtgtttaacttgaacacatataaaaccaaagaagaaatgattgtagcaacatcccagacatcccaatatggtggggacctcacaaacacattcggagcaattcaatatgcaagaaaatatgcctattcagcagcttctggtgggcgacgaagtgctacgaaagtaatggtagttgtaactgacggtgaatcacatgatggttcaatgttgaaagctgtgattgatcaatgcaaccatgacaatatactgaggtttggcatagcagttcttgggtacttaaacagaaacgcccttgatactaaaaatttaataaaagaaataaaagcgatcgctagtattccaacagaaagatactttttcaatgtgtctgatgaagcagctctactagaaaaggctgggacattaggagaacaaattttcagcattgaaggtactgttcaaggaggagacaactttcagatggaaatgtcacaagtgggattcagtgcagattactcttctcaaaatgatattctgatgctgggtgcagtgggagcttttggctggagtgggaccattgtccagaagacatctcatggccatttgatctttcctaaacaagcctttgaccaaattctgcaggacagaaatcacagttcatatttaggttactctgtggctgcaatttctactggagaaagcactcactttgttgctggtgctcctcgggcaaattataccggccagatagtgctatatagtgtgaatgagaatggcaatatcacggttattcaggctcaccgaggtgaccagattggctcctattttggtagtgtgctgtgttcagttgatgtggataaagacaccattacagacgtgctcttggtaggtgcaccaatgtacatgagtgacctaaagaaagaggaaggaagagtctacctgtttactatcaaaaagggcattttgggtcagcaccaatttcttgaaggccccgagggcattgaaaacactcgatttggttcagcaattgcagctctttcagacatcaacatggatggctttaatgatgtgattgttggttcaccactagaaaatcagaattctggagctgtatacatttacaatggtcatcagggcactatccgcacaaagtattcccagaaaatcttgggatccgatggagcctttaggagccatctccagtactttgggaggtccttggatggctatggagatttaaatggggattccatcaccgatgtgtctattggtgcctttggacaagtggttcaactctggtcacaaagtattgctgatgtagctatagaagcttcattcacaccagaaaaaatcactttggtcaacaagaatgctcagataattctcaaactctgcttcagtgcaaagttcagacctactaagcaaaacaatcaagtggccattgtatataacatcacacttgatgcagatggattttcatccagagtaacctccagggggttatttaaagaaaacaatgaaaggtgcctgcagaagaatatggtagtaaatcaagcacagagttgccccgagcacatcatttatatacaggagccctctgatgttgtcaactctttggatttgcgtgtggacatcagtctggaaaaccctggcactagccctgcccttgaagcctattctgagactgccaaggtcttcagtattcctttccacaaagactgtggtgaggatggactttgcatttctgatctagtcctagatgtccgacaaataccagctgctcaagaacaaccctttattgtcagcaaccaaaacaaaaggttaacattttcagtaacactgaaaaataaaagggaaagtgcatacaacactggaattgttgttgatttttcagaaaacttgttttttgcatcattctccctaccggttgatgggacagaagtaacatgccaggtggctgcatctcagaagtctgttgcctgcgatgtaggctaccctgctttaaagagagaacaacaggtgacttttactattaactttgacttcaatcttcaaaaccttcagaatcaggcgtctctcagtttccaagccttaagtgaaagccaagaagaaaacaaggctgataatttggtcaacctcaaaattcctctcctgtatgatgctgaaattcacttaacaagatctaccaacataaatttttatgaaatctcttcggatgggaatgttccttcaatcgtgcacagttttgaagatgttggtccaaaattcatcttctccctgaaggtaacaacaggaagtgttccagtaagcatggcaactgtaatcatccacatccctcagtataccaaagaaaagaacccactgatgtacctaactggggtgcaaacagacaaggctggtgacatcagttgtaatgcagatatcaatccactgaaaataggacaaacatcttcttctgtatctttcaaaagtgaaaatttcaggcacaccaaagaattgaactgcagaactgcttcctgtagtaatgttacctgctggttgaaagacgttcacatgaaaggagaatactttgttaatgtgactaccagaatttggaacgggactttcgcatcatcaacgttccagacagtacagctaacggcagctgcagaaatcaacacctataaccctgagatatatgtgattgaagataacactgttacgattcccctgatgataatgaaacctgatgagaaagccgaagtaccaacaggagttataataggaagtataattgctggaatccttttgctgttagctctggttgcaattttatggaagctcggcttcttcaaaagaaaatatgaaaagatgaccaaaaatccagatgagattgatgagaccacagagctcagtagctgaaccagcagacctacctgcagtgggaaccggcagcatcccagccagggtttgctgtttgcgtgcatggatttctttttaaatcccatattttttttatcatgtcgtaggtaaactaacctggtattttaagagaaaactgcaggtcagtttggatgaagaaattgtggggggtgggggaggtgcggggggcaggtagggaaataatagggaaaatacctattttatatgatgggggaaaaaaagtaatctttaaactggctggcccagagtttacattctaatttgcattgtgtcagaaacatgaaatgcttccaagcatgacaacttttaaagaaaaatatgatactctcagattttaagggggaaaactgttctctttaaaatatttgtctttaaacagcaactacagaagtggaagtgcttgatatgtaagtacttccacttgtgtatattttaatgaatattgatgttaacaagaggggaaaacaaaacacaggttttttcaatttatgctgctcatccaaagttgccacagatgatacttccaagtgataattttatttataaactaggtaaaatttgttgttggttccttttataccacggctgccccttccacaccccatcttgctctaatgatcaaaacatgcttgaataactgagcttagagtatacctcctatatgtccatttaagttaggagagggggcgatatagagactaaggcacaaaattttgtttaaaactcagaatataacatttatgtaaaatcccatctgctagaagcccatcctgtgccagaggaaggaaaaggaggaaatttcctttctcttttaggaggcacaacagttctcttctaggatttgtttggctgactggcagtaacctagtgaatttttgaaagatgagtaatttctttggcaaccttcctcctcccttactgaaccactctcccacctcctggtggtaccattattatagaagccctctacagcctgactttctctccagcggtccaaagttatcccctcctttacccctcatccaaagttcccactccttcaggacagctgctgtgcattagatattaggggggaaagtcatctgtttaatttacacacttgcatgaattactgtatataaactccttaacttcagggagctattttcatttagtgctaaacaagtaagaaaaataagctagagtgaatttctaaatgttggaatgttatgggatgtaaacaatgtaaagtaaaacactctcaggatttcaccagaagttacagatgaggcactggaaaccaccaccaaattagcaggtgcaccttctgtggctgtcttgtttctgaagtactttttcttccacaagagtgaatttgacctaggcaagtttgttcaaaaggtagatcctgagatgatttggtcagattgggataaggcccagcaatctgcattttaacaagcaccccagtcactaggatgcagatggaccacactttgagaaacaccacccatttctactttttgcaccttattttctctgttcctgagcccccacattctctaggagaaacttagattaaaattcacagacactacatatctaaagctttgacaagtccttgacctctataaacttcagagtcctcattataaaatgggaagactgagctggagttcagcagtgatgctttttagttttaaaagtctatgatctgatctggacttcctataatacaaatacacaatcctccaagaatttgacttggaaaag

SEQ ID NO: 959 - DNA, 345 bp, Homo sapiens
tttttttttacatgcacacatttttactattttagttatattggaacttgagaatttcacagcagtctactaaaatcacagatcaataggataaaagtagataagaagaatgtgcaatttataaatacggtttattaccatggttacaaactttcagaacaggcctctgagacattggactgagactctgccgaacatcttttggcatcggtgtcctttttcttctgtcgcggaaggcagccccggactgcaaggcctccagcagattatccatcactcctgtctcatcaccctcagtcttcatttctaataaacgctttttcttttgttggcgttcgagtcttt

SEQ ID NO: 960 - DNA, 2706 bp, Homo sapiens
attgtccggagtgggtccttgacattcaggaaagatacatccttagacctttcaaaatttgtcatgcctctctaacctaaaacagccctcattaaatgcactttaatccgagcactgtatggcttggaaagaattatgagtgaggagaggagcctttccttattggccaaagccgtggatcccagacaccccaatatgatgacagatgtggttaaacttctctctgcggtatgcattgtaggggaagaaagcatccttgaagaagttttagaagctttaacttcagctggtgaagaaaaaaaaattgacagatttttttgtattgtggaaggcctccggcacaattcagttcaactgcaagtagcttgtatgcagctcatcaatgccctggttacatctcctgatgatttggatttcaggcttcacatcagaaatgaatttatgcgttgtggattgaaagagatattgccaaatttaaaatgcattaagaatgatggcctggatatccaacttaaagtctttgatgagcataaagaagaagatttgtttgagttatcccatcgccttgaagatattagagctgaacttgatgaagcatatgatgtttacaacatggtgtggagcacagttaaagaaactagagcagagggatattttatttctattcttcagcatcttttgctgattcgaaatgattattttataaggcaacaatacttcaaattaattgatgagtgtgtatcccagattgtattgcatagagatggaatggatccagacttcacatatcgaaaaagactagatttagatttaacccagtttgtagacatttgcatagatcaagcaaaactagaagagtttgaagagaaagcatcagaactttacaagaaatttgaaaaagagtttaccgaccaccaagaaactcaggctgaattgcagaaaaaagaggcaaagattaatgagcttcaagcagagctacaagcttttaagtctcagtttggtgccttgccagctgattgtaatattcctttgcctccctctaaagaaggtggaactggccactcagcacttcctcctccgcctccactgccttctggtggaggggtgccgcctccacctcctcccccaccacctcctccacttccaggaatgcggatgccattcagtggtcctgtgcctccaccacctcccctgggattccttggaggacaaaattctcctcctctaccaatcctgccatttgggttgaaaccaaagaaagaatttaaacctgaaatcagcatgagaagattgaattggttaaagatcagacctcatgaaatgactgaaaactgtttctggataaaagtaaatgaaaataagtatgaaaacgtggatttgctttgtaaacttgagaatacattttgttgccaacaaaaagagagaagagaagaggaagatattgaagagaagaaatcgattaagaaaaaaattaaagaacttaagtttttagattctaaaattgcccagaacctttcaatcttcctgagctcttttcgggtgccatatgaggaaatcagaatgatgatattggaagtagatgaaacacggttggcagagtctatgattcagaacttaataaagcatcttcctgatcaagagcaattaaattcattgtctcagttcaagagtgaatatagcaacttatgtgaacctgagcagtttgtggttgtgatgagcaatgtgaagagactacggccacggctcagtgctattctctttaagcttcagtttgaagagcaggtgaacaacatcaaacctgacatcatggctgtcagtactgcctgcgaagagataaagaagagcaaaagctttagcaagttgctggaacttgtattgctaatgggaaactacatgaatgctggctcccggaatgctcaaaccttcggatttaaccttagctctctctgtaaactaaaggacacaaaatcagcagatcagaaaacaacgctacttcatttcctggtagaaatatgtgaagagaagtaccctgatatactgaattttgtggatgatttggaacctttagacaaagctagtaaagtctctgtagaaacgctggaaaagaatttgaggcagatgggaaggcagcttcaacagcttgagaaggaattggaaacctttccccctcctgaggacttgcatgacaagtttgtgacaaagatgtccagatttgttatcagtgcaaaagaacaatatgagacactttcgaagttacacgaaaacatggaaaagttataccagagtataataggatactatgccattgatgtgaagaaggtgtctgtggaagactttcttactgacctgaataacttcagaaccacattcatgcaagcaataaaggagaatatcaaaaaaagagaagcagaggaaaaagaaaaacgtgtcagaatagctaaagaattagcagagcgagaaagactcgaacgccaacaaaagaaaaagcgtttattagaaatgaagactgagggtgatgagacaggagtgatggataatctgctggaggccttgcagtccggggctgccttccgcgacagaagaaaaaggacaccgatgccaaaagatgttcggcagagtctcagtccaatgtctcagaggcctgttctgaaagtttgtaaccatggtaataaaccgtatttataaattacaaaaaaaaaaaaaaaa

SEQ ID NO: 961 - DNA, 573 bp, Homo sapiens
gttcaggatccccgctatctcagggctctctgggccagtcctcctgggagcccccaccacaacacttcccaggcatgagctctcaggcgccacatgagcttccacacactgagaagtgtccgagaaattggtggggcctctgaaggacgtgtgagcagccacctgaactcccagctcaccagcccaaacagggtgcaggggctctggcctgaagaacctgagtggagtggaatggcactggctggccactcagctcagcgggcgacgtgcccctacaagttggcagaagtggctgccactgctgggtttgtgtaagagaggctgctgcaccattacctgcagaaaccttctcataggggctacgatcggtactgctagggggcacatagcggccatgggtgtggtaggtggggtactcgctcataggatggtaagtatcccgggctggaaagatgtccagctgcccgtaattctttccgcggcacttacagacaggcaaggcaatgagatagacaatggccagcgcaccaggacaaagaccagcaccaacagcgcatggccccagcctggacc

SEQ ID NO: 962 - DNA, 608 bp, Homo sapiens
ctcgatataacctgacgattcacgtcagcgtgagtgatgtgccatttctttctctgcccagtctgggtggggtgccagctggggcatcgcgctgctggtgctggtctgtgttctggttgcgctggcattgtcatccattgccttgctgtctgtcagtgccgccgaaagaactacgggcagctggacatctttccagcccgggatacctaccatcctatgagcgagtaccccacctaccacacccatgggcgctatgtgcccctagcagtaccgatcgtagcccctatgagaaggtttctgcaggtaatggtggcagcagcctctcttacacaaacccagcagtggcagccacttctgccaacttgtatgggcacgtcgccggctgagctgagtgggcagcccagtgcatttcattccactcaggttcttcaggggcagagccctgcaccctgtttgggctggtgagctgggagttcaggtgggctgctcacagctccttcagaggccccacaatttctcgacacttctcatgtgtggaagccatgtgggccctgaaggccatgctgggaagtgttgtggtggggttccaggggactggccagaagccc

SEQ ID NO: 963 - DNA, 298 bp, Homo sapiens
tttttcttcgtccttttggtttaaaaagtttcacgtcttggtgccttttgtgtgatgcgccttgctgatggcttgacatgtgcaattgtgagggacatgctcacctctagccttaaggggggcagggagtgatgatttgggggaggctttgggagcaaaataaggaagagggctgagctgagcttcggttctccagaatgtaagaaaacaaaatctaaaacaaaatctgaactctcaaaagtctatttttttaactgaaaatgtaaatttataaatatattcaggagttggaatgttg

SEQ ID NO: 964 - DNA, 434 bp, Homo sapiens
gccaaacagtcactttgtttaagcaaacacaagtacaaagtaaaatagaaccacaaaataatgaactgcatgttcataacatacaaaaatcgccgcctactcagtaggtaactacaacattccaactcctgaatatatttataaatttacattttcagttaaaagaatagacttttgagagttcagattttgttttagattttgttttcttacattctggagaaccgaagctcagctcagccctcttccttattttgctcccaaagcctcccccaaatcatcactccctgccccccttaaggctagaggtgagcatgtccctcacaattgcacatgtcaagccatcagcaaggcgcatcacacaaaaggcaccaagacgtgaaactttttaaaccaaaaggacgaagaaaaaacactttcaaaaaaaaaaaaaa

SEQ ID NO: 965 - DNA, 3136 bp, Homo sapiens
gcgcagaacttggggagccgccgccgccatccgccgccgcagccagcttccgccgccgcaggaccggcccctgccccagcctccgcagccgcggcgcgtccacgcccgcccgcgcccagggcgagtcggggtcgccgcctgcacgcttctcagtgttccccgcgccccgcatgtaacccggccaggcccccgcaactgtgtcccctgcagctccagccccgggctgcacccccccgccccgacaccagctctccagcctgctcgtccaggatggccgcggccaaggccgagatgcagctgatgtccccgctgcagatctctgacccgttcggatcctttcctcactcgcccaccatggacaactaccctaagctggaggagatgatgctgctgagcaacggggctccccagttcctcggcgccgccggggccccagagggcagcggcagcaacagcagcagcagcagcagcgggggcggtggaggcggcgggggcggcagcaacagcagcagcagcagcagcaccttcaaccctcaggcggacacgggcgagcagccctacgagcacctgaccgcagagtcttttcctgacatctctctgaacaacgagaaggtgctggtggagaccagttaccccagccaaaccactcgactgccccccatcacctatactggccgcttttccctggagcctgcacccaacagtggcaacaccttgtggcccgagcccctcttcagcttggtcagtggcctagtgagcatgaccaacccaccggcctcctcgtcctcagcaccatctccagcggcctcctccgcctccgcctcccagagcccacccctgagctgcgcagtgccatccaacgacagcagtcccatttactcagcggcacccaccttccccacgccgaacactgacattttccctgagccacaaagccaggccttcccgggctcggcagggacagcgctccagtacccgcctcctgcctaccctgccgccaagggtggcttccaggttcccatgatccccgactacctgtttccacagcagcagggggatctgggcctgggcaccccagaccagaagcccttccagggcctggagagccgcacccagcagccttcgctaacccctctgtctactattaaggcctttgccactcagtcgggctcccaggacctgaaggccctcaataccagctaccagtcccagctcatcaaacccagccgcatgcgcaagtaccccaaccggcccagcaagacgcccccccacgaacgcccttacgcttgcccagtggagtcctgtgatcgccgcttctcccgctccgacgagctcacccgccacatccgcatccacacaggccagaagcccttccagtgccgcatctgcatgcgcaacttcagccgcagcgaccacctcaccacccacatccgcacccacacaggcgaaaagcccttcgcctgcgacatctgtggaagaaagtttgccaggagcgatgaacgcaagaggcataccaagatccacttgcggcagaaggacaagaaagcagacaaaagtgttgtggcctcttcggccacctcctctctctcttcctacccgtccccggttgctacctcttacccgtccccggttactacctcttatccatccccggccaccacctcatacccatcccctgtgcccacctccttctcctctcccggctcctcgacctacccatcccctgtgcacagtggcttcccctccccgtcggtggccaccacgtactcctctgttccccctgctttcccggcccaggtcagcagcttcccttcctcagctgtcaccaactccttcagcgcctccacagggctttcggacatgacagcaaccttttctcccaggacaattgaaatttgctaaagggaaaggggaaagaaagggaaaagggagaaaaagaaacacaagagacttaaaggacaggaggaggagatggccataggagaggagggttcctcttaggtcagatggaggttctcagagccaagtcctccctctctactggagtggaaggtctattggccaacaatcctttctgcccacttccccttccccaattactattccctttgacttcagctgcctgaaacagccatgtccaagttcttcacctctatccaaagaacttgatttgcatggattttggataaatcatttcagtatcatctccatcatatgcctgaccccttgctcccttcaatgctagaaaatcgagttggcaaaatggggtttgggcccctcagagccctgccctgcacccttgtacagtgtctgtgccatggatttcgtttttcttggggtactcttgatgtgaagataatttgcatattctattgtattatttggagttaggtcctcacttgggggaaaaaaaaaaaagaaaagccaagcaaaccaatggtgatcctctattttgtgatgatgctgtgacaataagtttgaacctttttttttgaaacagcagtcccagtattctcagagcatgtgtcagagtgttgttccgttaacctttttgtaaatactgcttgaccgtactctcacatgtggcaaaatatggtttggtttttctttttttttttttttgaaagtgttttttcttcgtccttttggtttaaaaagtttcacgtcttggtgccttttgtgtgatgcgccttgctgatggcttgacatgtgcaattgtgagggacatgctcacctctagccttaaggggggcagggagtgatgatttgggggaggctttgggagcaaaataaggaagagggctgagctgagcttcggttctccagaatgtaagaaaacaaaatctaaaacaaaatctgaactctcaaaagtctatttttttaactgaaaatgtaaatttataaatatattcaggagttggaatgttgtagttacctactgagtaggcggcgatttttgtatgttatgaacatgcagttcattattttgtggttctattttactttgtacttgtgtttgcttaaacaaagtgactgtttggcttataaacacattgaatgcgctttattgcccatgggatatgtggtgtatatccttccaaaaaattaaaacgaaaataaagtagctgcgattggg

SEQ ID NO: 966 - DNA, 441 bp, Homo sapiens
cgagtctcagaaaataccaggaatgactctatccagttctgtttgtcaagtaaactgttgtgccagagaaacttcacttgcggagaacatttggcaggaacaacctcattctaaaggtcccagtgtacctttctccatttttgatgagtttcttctttcagaaaagaagaacaaaagtcctcctgcagatcccccacgagttttagctcaacgaagaccccttgcagttctcaaaacctcagaaagcatcacctcaaatgaagatgtgtctccagatgtttgtgatgaatttacaggaattgaacccttgagcgaggatgccattatcacaggcttcagaaatgtaacaatttgtcctaacccagaagacacttgtgactttgccagagcagctcgttttgcatccactccttttcatgagataatgtccttgaaggatct

SEQ ID NO: 967 - DNA, 184 bp, Homo sapiens
ttaacagatactattttattatttacaaaatacatggtgatcataagagaacattttacaaattacaaatgggaaaagtacagggaaaagtagagacaaatgggttaaataacaaggtaaccatttgtaatgagtctgtttagaataaaatagttcttcacaaaagttagacaaggccatgagt

SEQ ID NO: 968 - DNA, 3721 bp, Homo sapiens
accgttaaatttgaaacttggcggctaggggtgtgggcttgaggtggccggtttgttagggagtcgtgtacgtgccttggtcgcttctgtagctccgagggcaggttgcggaagaaagcccaggcggtctgtggcccagaggaaaggcctgcagcaggacgaggacctgagccaggaatgcaggatggcggcggtgaagaaggaagggggtgctctgagtgaagccatgtccctggagggagatgaatgggaactgagtaaagaaaatgtacaacctttaaggcaagggcggatcatgtccacgcttcagggagcactggcacaagaatctgcctgtaacaatactcttcagcagcagaaacgggcatttgaatatgaaattcgattttacactggaaatgaccctctggatgtttgggataggtatatcagctggacagagcagaactatcctcaaggtgggaaggagagtaatatgtcaacgttattagaaagagctgtagaagcactacaaggagaaaaacgatattatagtgatcctcgatttctcaatctctggcttaaattagggcgtttatgcaatgagcctttggatatgtacagttacttgcacaaccaagggattggtgtttcacttgctcagttctatatctcatgggcagaagaatatgaagctagagaaaactttaggaaagcagatgcgatatttcaggaagggattcaacagaaggctgaaccactagaaagactacagtcccagcaccgacaattccaagctcgagtgtctcggcaaactctgttggcacttgagaaagaagaagaggaggaagtttttgagtcttctgtaccacaacgaagcacactagctgaactaaagagcaaagggaaaaagacagcaagagctccaatcatccgtgtaggaggtgctctcaaggctccaagccagaacagaggactccaaaatccatttcctcaacagatgcaaaataatagtagaattactgtttttgatgaaaatgctgatgaggcttctacagcagagttgtctaagcctacagtccagccatggatagcaccccccatgcccagggccaaagagaatgagctgcaagcaggcccttggaacacaggcaggtccttggaacacaggcctcgtggcaatacagcttcactgatagctgtacccgctgtgcttcccagtttcactccatatgtggaagagactgcacaacagccagttatgacaccatgtaaaattgaacctagtataaaccacatcctaagcaccagaaagcctggaaaggaagaaggagatcctctacaaagggttcagagccatcagcaagcgtctgaggagaagaaagagaagatgatgtattgtaaggagaagatttatgcaggagtaggggaattctcctttgaagaaattcgggctgaagttttccggaagaaattaaaagagcaaagggaagccgagctattgaccagtgcagagaagagagcagaaatgcagaaacagattgaagagatggagaagaagctaaaagaaatccaaactactcagcaagaaagaacaggtgatcagcaagaagagacgatgcctacaaaggagacaactaaactgcaaattgcttccgagtctcagaaaataccaggaatgactctatccagttctgtttgtcaagtaaactgttgtgccagagaaacttcacttgcggagaacatttggcaggaacaacctcattctaaaggtcccagtgtacctttctccatttttgatgagtttcttctttcagaaaagaagaataaaagtcctcctgcagatcccccacgagttttagctcaacgaagaccccttgcagttctcaaaacctcagaaagcatcacctcaaatgaagatgtgtctccagatgtttgtgatgaatttacaggaattgaacccttgagcgaggatgccattatcacaggcttcagaaatgtaacaatttgtcctaacccagaagacacttgtgactttgccagagcagctcgttttgtatccactccttttcatgagataatgtccttgaaggatctcccttctgatcctgagagactgttaccggaagaagatctagatgtaaagacctctgaggaccagcagacagcttgtggcactatctacagtcagactctcagcatcaagaagctgagcccaattattgaagacagtcgtgaagccacacactcctctggcttctctggttcttctgcctcggttgcaagcacctcctccatcaaatgtcttcaaattcctgagaaactagaacttactaatgagacttcagaaaaccctactcagtcaccatggtgttcacagtatcgcagacagctactgaagtccctaccagagttaagtgcctctgcagagttgtgtatagaagacagaccaatgcctaagttggaaattgagaaggaaattgaattaggtaatgaggattactgcattaaacgagaatacctaatatgtgaagattacaagttattctgggtggcgccaagaaactctgcagaattaacagtaataaaggtatcttctcaacctgtcccatgggacttttatatcaacctcaagttaaaggaacgtttaaatgaagattttgatcatttttgcagctgttatcaatatcaagatggctgtattgtttggcaccaatatataaactgcttcacccttcaggatcttctccaacacagtgaatatattacccatgaaataacagtgttgattatttataaccttttgacaatagtggagatgctacacaaagcagaaatagtccatggtgacttgagtccaaggtgtctgattctcagaaacagaatccacgatccctatgattgtaacaagaacaatcaagctttgaagatagtggacttttcctacagtgttgaccttagggtgcagctggatgtttttaccctcagcggctttcggactgtacagatcctggaaggacaaaagatcctggctaactgttcttctccctaccaggtagacctgtttggtatagcagatttagcacatttactattgttcaaggaacacctacaggtcttctgggatgggtccttctggaaacttagccaaaatatttctgagctaaaagatggtgaattgtggaataaattctttgtgcggattctgaatgccaatgatgaggccacagtgtctgttcttggggagcttgcagcagaaatgaatggggtttttgacactacattccaaagtcacctgaacaaagccttatggaaggtagggaagttaactagtcctggggctttgctctttcagtgagctaggcaatcaagtctcacagattgctgcctcagagcaatggttgtattgtggaacactgaaactgtatgtgctgtaatttaatttaggacacatttagatgcactaccattgctgttctactttttggtacaggtatattttgacgtcactgatattttttatacagtgatatacttactcatggccttgtctaacttttgtgaagaactattttattctaaacagactcattacaaatggttaccttgttatttaacccatttgtctctacttttccctgtacttttcccatttgtaatttgtaaaatgttctcttatgatcaccatgtattttgtaaataataaaatagtatctgttaaatttgtgcttctaaaaaaaaa

SEQ ID NO: 969 - DNA, 401 bp, Homo sapiens
tttaccttaagaaaaaccaatcgctttatttttcctcaatatatgtttagaaaactggtctgagaagaggtttcatgagatagaccagaggactatgtacaaaatcaagagttctaaaccaataagaaaaagggcacaatgaagcacacatccccaggggccacggcagcctaggaccttcctatcagtggggaggcaaggtctttgacggcttttgagttcagctgagggatcatgctgatcttcaggagtttgctgcttgcatacttattcttgatggcgatgaatttagttaagttttcatttactttcaccacattcttggccatgtgctgcatgacttccaatacttcattctctgtgtatcctgtgtaatactgctgctttaagttccattttcc

SEQ ID NO: 970 - DNA, 311 bp, Homo sapiens
tttttaaacttccaagaatctttattgaacttgctcagcatcaagcacgtgtctgaaggagccagggtggaaaaaaaaagtgcccactggcgacagggagggccccagctggcagaccccccaaccacatcagaggagttttcatttcttcctgggctgcttatctgggaagccttcaaagaattcgttacacatcatggcgatgcaggacaggaagacacagtactcttggaagtccacctcgttgtccctgttgctgtccaagttgctcatcagcttctggaaagcagcttcatctgtccttttcccca

SEQ ID NO: 971 - DNA, 512 bp, Homo sapiens
attcttcccctctctacaaccctctctcctcagcgcttcttctttcttggtttgatcctgactgctgtcatggcgtgccctctggagaaggccctggatgtgatggtgtccaccttccacaagtactcgggcaaagagggtgacaagttcaagctcaacaagtcagaactaaaggagctgctgacccgggagctgcccagcttcttggggaaaaggacagatgaagctgctttccagaagctgatgagcaacttggacagcaacagggacaacgaggtggacttccaagagtactgtgtcttcctgtcctgcatcgccatgatgtgtaacgaattctttgaaggcttcccagataagcagcccaggaagaaatgaaaactcctctgatgtggttggggggtctgccagctggggccctccctgtcgccagtgggcacttttttttttccaccctggctccttcagacacgtgcttgatgctgagcaagttcaataaagattcttggaagttt

SEQ ID NO: 972 - DNA, 417 bp, Homo sapiens
aatatacataattttattacaaaattttttttaaaaaaacgaaatgcaacatcctaaaaaacccaaaatttactattgatactaattcctacaagtttgctgtgctaccatacacaagaaattaaaaaaaccattaaatatttaggaacattcaacatcagaagctgtaaaatctaactgtatgagtagcccatcaaaaagctacaacctgcattttttaaaagtattttctctacagagaatcttatcagctatacaaaaatctgtacagtttttatactgaagctagtattgagctgcacttgaattcacattcttagcaaaataattgcctgagcacacacacacattccacacgcatcattaaaggatagccatttattcttcatcttcatcctcttcctcctcatcttcatc

SEQ ID NO: 973 - DNA, 1277 bp, Homo sapiens
gatgtggcccgtggcctagctcgtcaagttgccgtggcgcggagaactctgcaaaacaagaggctgaggattgcgttagagataaaccagttcacgccggagccccgtgagggaagcgtctccgttgggtccggccgctctgcgggactctgaggaaaagctcgcaccaggtggacgcggatctgtcaacatgggtaaaggagaccccaacaagccgcggggcaaaatgtcctcgtacgccttcttcgtgcagacctgccgggaagagcacaagaagaaacacccggactcttccgtcaatttcgcggaattctccaagaagtgttcggagagatggaagaccatgtctgcaaaggagaagtcgaagtttgaagatatggcaaaaagtgacaaagctcgctatgacagggagatgaaaaattacgttcctcccaaaggtgataagaaggggaagaaaaaggaccccaatgctcctaaaaggccaccatctgccttcttcctgttttgctctgaacatcgcccaaagatcaaaagtgaacaccctggcctatccattggggatactgcaaagaaattgggtgaaatgtggtctgagcagtcagccaaagataaacaaccatatgaacagaaagcagctaagctaaaggagaaatatgaaaaggatattgctgcatatcgtgccaagggcaaaagtgaagcaggaaagaagggccctggcaggccaacaggctcaaagaagaagaacgaaccagaagatgaggaggaggaggaggaagaagaagatgaagatgaggaggaagaggatgaagatgaagaataaatggctatcctttaatgatgcgtgtggaatgtgtgtgtgtgctcaggcaattattttgctaagaatgtgaattcaagtgcagctcaatactagcttcagtataaaaactgtacagatttttgtatagctgataagattctctgtagagaaaatacttttaaaaaatgcaggttgtagctttttgatgggctactcatacagttagattttacagcttctgatgttgaatgttcctaaatatttaatggtttttttaatttctgtgtgtatggtagcacagcaaacttgtaggaattagtatcaatagtaaattttgggttttttaggatgttgcatttcgtttttttaaaaaaaattttgtaataaaattatgtatattatttctattgtctttgtcttaatatgctaagttaattttcactttaaaaaagccatttgaagaccaaaaaaaaaaaaa

SEQ ID NO: 974 - DNA, 416 bp, Homo sapiens
catgactttattagaaaaataaaaaacaactgaggtgatgggttggtcttcagcggatccttggtggatgaggctgcttttggctgcactggccttctcccgctcccgccgccgcgcagggtccaactcaaaacagcgccatagcctcagggtctcatctgctgctgcggatgcactgtggccccatctgggctcatggtcagactcaggacccgggatgtgtgacctttgagttcagccaccttggccatggttgggtacttccaaataactagctggttctgtgcaaagccatggcctgagatgagctccttgtaatggggagaccagaggatggagcacacctgggaatgggcatccacggcactcagacaggccccagagcacacattccagatgcgaatgtgggtattact

SEQ ID NO: 975 - DNA, 1076 bp, Homo sapiens
  modified_base (650)..(650): a, c, t or g
  modified_base (653)..(653): a, c, t or g
  modified_base (665)..(665): a, c, t or g
  modified_base (698)..(698): a, c, t or g
  modified_base (701)..(701): a, c, t or g
  modified_base (705)..(705): a, c, t or g
  modified_base (711)..(711): a, c, t or g
  modified_base (716)..(716): a, c, t or g
  modified_base (721)..(721): a, c, t or g
  modified_base (732)..(732): a, c, t or g
  modified_base (734)..(734): a, c, t or g
  modified_base (746)..(746): a, c, t or g
  modified_base (748)..(748): a, c, t or g
  modified_base (750)..(750): a, c, t or g
  modified_base (753)..(753): a, c, t or g
  modified_base (770)..(770): a, c, t or g
  modified_base (774)..(774): a, c, t or g
  modified_base (776)..(777): a, c, t or g
  modified_base (783)..(783): a, c, t or g
  modified_base (789)..(789): a, c, t or g
  modified_base (793)..(793): a, c, t or g
  modified_base (795)..(795): a, c, t or g
  modified_base (799)..(800): a, c, t or g
  modified_base (804)..(804): a, c, t or g
  modified_base (808)..(808): a, c, t or g
  modified_base (811)..(811): a, c, t or g
  modified_base (813)..(813): a, c, t or g
  modified_base (816)..(817): a, c, t or g
  modified_base (822)..(822): a, c, t or g
  modified_base (825)..(825): a, c, t or g
  modified_base (832)..(832): a, c, t or g
  modified_base (839)..(839): a, c, t or g
  modified_base (842)..(842): a, c, t or g
  modified_base (846)..(846): a, c, t or g
  modified_base (848)..(848): a, c, t or g
  modified_base (852)..(852): a, c, t or g
  modified_base (864)..(864): a, c, t or g
  modified_base (871)..(871): a, c, t or g
  modified_base (873)..(874): a, c, t or g
  modified_base (883)..(883): a, c, t or g
  modified_base (885)..(885): a, c, t or g
  modified_base (887)..(887): a, c, t or g
  modified_base (895)..(895): a, c, t or g
  modified_base (898)..(898): a, c, t or g
  modified_base (903)..(903): a, c, t or g
  modified_base (911)..(911): a, c, t or g
  modified_base (913)..(913): a, c, t or g
  modified_base (917)..(917): a, c, t or g
  modified_base (924)..(924): a, c, t or g
  modified_base (936)..(936): a, c, t or g
  modified_base (947)..(947): a, c, t or g
  modified_base (955)..(955): a, c, t or g
  modified_base (961)..(961): a, c, t or g
  modified_base (970)..(970): a, c, t or g
  modified_base (972)..(972): a, c, t or g
  modified_base (978)..(978): a, c, t or g
  modified_base (980)..(980): a, c, t or g
  modified_base (1010)..(1010): a, c, t or g
  modified_base (1031)..(1032): a, c, t or g
  modified_base (1040)..(1040): a, c, t or g
  modified_base (1044)..(1044): a, c, t or g
  modified_base (1047)..(1049): a, c, t or g
  modified_base (1053)..(1053): a, c, t or g
  modified_base (1055)..(1057): a, c, t or g
  modified_base (1059)..(1061): a, c, t or g
  modified_base (1064)..(1064): a, c, t or g
  modified_base (1073)..(1073): a, c, t or g
  modified_base (1076)..(1076): a, c, t or g
cgctcctatgggaatttggccctcgaggccaagaattcggcacgaggcagagtcttcctccacaaactgggattcatccccgctgaaaaagcacaatctaacagcaagggaacaaaaaaaccatgctatcacataatactatgatgaagcagagaaaacagcaagcaacagccatcatgaaggaagtccatggaaatgatgttgatggcatggacctgggcaaaaaggtcagcatccccagagacatcatgttggaagaattatcccatctcagtaaccgtggtgccaggctatttaagatgcgtcaaagaagatctgacaaatacacatttgaaaatttccagtatcaatctagagcacaaataaatcacagtattgctatgcagaatgggaaagtggatggaagtaacttggaaggtggttcgcagcaagcccccttgactcctcccaacaccccagatccacgaagccctccaaatccagacaacattgctccaggatattctggaccactgaaggaaattcctcctgaaaaattcaacaccacagctgtccctaagtactatcaatctccctgggaacaagccattagcaatgatccggagctttttagaggcttttatatcctaaactttttcaggcctgaaggnaanggcaaaactgcntgattacaggagcttttaacaggggtggccccnccntttnggaggntttgnaaaancctccaggatngnttaattttaagntncnaanttttgagcttcttttgnttanannatcccnggtttntgtncnttgnncatncccnttncnggnnaacgntcntttattnggactcntangggnanggantttctgaaaaantttcctnanngggaaaacnancngaaccttncgnatgantcccctgntncccnaattccnaaaaaccttttnaaaagaaaagntttttttngggccncataaaaantntgaaantnaaaaggtggcggttccccccttttttaacnacgggggaaaagcccctttgnntttttttntttnggnnnccancnnntnnncantttttttgnttn

SEQ ID NO: 976 - DNA, 2532 bp, Homo sapiens
gtcccaggttcaaggataaaaaccatcaggcccaagtgccatccatagtccatctccagagtcttcctccacaaactgggattcatccccgctgaaaaagcacaatctaacagcaagggaacaaaaaaaccatgctatcacataatactatgatgaagcagagaaaacagcaagcaacagccatcatgaaggaagtccatggaaatgatgttgatggcatggacctgggcaaaaaggtcagcatccccagagacatcatgttggaagaattatcccatctcagtaaccgtggtgccaggctatttaagatgcgtcaaagaagatctgacaaatacacatttgaaaatttccagtatcaatctagagcacaaataaatcacagtattgctatgcagaatgggaaagtggatggaagtaacttggaaggtggttcgcagcaagcccccttgactcctcccaacaccccagatccacgaagccctccaaatccagacaacattgctccaggatattctggaccactgaaggaaattcctcctgaaaaattcaacaccacagctgtccctaagtactatcaatctccctgggagcaagccattagcaatgatccggagcttttagaggctttatatcctaaacttttcaagcctgaaggaaaggcagaactgcctgattacaggagctttaacagggttgccacaccatttggaggttttgaaaaagcatcaagaatggttaaatttaaagttccagattttgagctactattgctaacagatcccaggtttatgtcctttgtcaatcccctttctggcagacggtcctttaataggactcctaagggatggatatctgagaatattcctatagtgataacaaccgaacctacagatgataccactgtaccagaatcagaagacctatgaaaagaaagttgtatgtgccacataaaactctgaatataaaagttgctgttctactattttaactactggcaaagcacttgcatttttcattagtagcaacaatagcaatttagtgattttccttttctgacattcaatttcaatctcagatcaaatactaataaacaattagaaatcttactttaaaaaacttataactcacttgtcttcattcataattttgttttcacctggtttaaagaatccagatattttactgcaaaagttcagatggaaaagtaattgacagcttcacctttgtctcattttatatgatttattacagtgtaagtttttcaagtggaatctagaatcaaaatacagggagagatatgaagacctattcagagtttcatctggggatgaaagctatggaagatgatgtacaaatgttattgatggagaaaatggttggtgtgtcctttctggtgaccatgagaaaataatatgtcttgatgaagtcttttcattagtcactcttagaattctaaagtgctttgcacttttcaatatgttttgaatcattaggtaatttattctggatgatattctccaaaattcaattcagttattatattcatttagcattaagtcaaggagactgagaatgactcaagggacgtcatagtaccatagttttaaggaccaaggtgtgcccagaattcaagtttcacaaatcccaatgctgtgcattgattatgttcaactttatgtgtgcattcttagaagagtaagaacaaataaagtacaccgtaatatacatataaatacattcatgtttgtgagagaaggaaagagtaagtaatttgaattggcagctttctttgctaaatctttaaattctgttaagatcctcaagtaactggggagtacatgctttaggacacaaacaaaaacaaagggcatgaaagtatctgaaagcaatgtagcacatatctatcgtaatatatgtaatatattgacataaaagacacaaactaatataaagttatagttatatcttaaaatataattgaagaagcatatgacatataacttatagaaatcagtatcaattcctcccatttcaattcagttaagacttctgtgatagatgtttatagcagagaagaaatgtctcatcaataggaaaactatcagataaagtttaggagataggaagaaggactgtgtgtagtaatgaaaataccaagttgcaacattacatgtttacaaaaaaaatctgtgtttgtagtgtggaagttggtgactgttttaatcatcatctagacttgttaagtagaaaaattttaaaaatttgcttatgaaaatataacccccagaaagtaacaatgacaaagtattatatttatatatattattgtagagaatttgtatatttttaaagatgtcttaagatatcttaattttatttataagttttggtgtttacctgttttaaaatgataatgttggcatctgtgataaactatcaatgaggctcccatcatgccattttttgttcattttaatctttaaaaaataaaaattaggcatattaaaaaaaaaaaaaaaaaaaaaaaaaaaa

SEQ ID NO: 977 - DNA, 765 bp, Homo sapiens
  modified_base (4)..(4): a, c, t or g
  modified_base (640)..(640): a, c, t or g
  modified_base (643)..(643): a, c, t or g
  modified_base (681)..(681): a, c, t or g
  modified_base (690)..(690): a, c, t or g
  modified_base (717)..(717): a, c, t or g
  modified_base (721)..(721): a, c, t or g
  modified_base (725)..(726): a, c, t or g
  modified_base (732)..(732): a, c, t or g
  modified_base (738)..(738): a, c, t or g
  modified_base (744)..(744): a, c, t or g
  modified_base (747)..(748): a, c, t or g
  modified_base (750)..(750): a, c, t or g
  modified_base (753)..(753): a, c, t or g
  modified_base (760)..(762): a, c, t or g
tttncacaggcaaacagcctatgacatgattacagaatttaatacgactcactatagggaatttggccctcgaggccaagaattcggcacgaggtggagtttcaccatgttggccaggctggtctcaaactcatatcctcaagtgatccaccctcctcgtcctcccaaagtgctgggattttgccatgagccaccacgctcagccatgtttagccatttttaaaaggtgtgaacagataattaagtctattagcaacattagaaaatttaagttaaaatttaaatgactctagcaagaattagcctttaggtgccctgggtccccctcctcaccgccccccaccccgccgccttctgagaagcgttttgtaatttttcttatttataaaatgggtttgattcaaaactgacttttcctcttcacagtctcacaggtccttccccaggtccaagaggctcttctgtgtcctgatgacaagtagctgcctagccgtggtggcacctcctatcacatgttaagggacccctccccagggccacacctggcagaaggtggcttatgatgttcgcagcttgaaagtagtgtaaaccaaagataaaattctaagcccactcccccagccatcggaatggacccctnctnttggccagggcactccaaagttaacctgaaaaaccggntcaggctgngaagagaaggtggagtggacatgcctnattnatgnnctcctncctttnggaatncannanagntgtccannntga

SEQ ID NO: 978 - DNA, 769 bp, Homo sapiens
  modified_base (4)..(4): a, c, t or g
  modified_base (724)..(724): a, c, t or g
  modified_base (730)..(730): a, c, t or g
  modified_base (748)..(748): a, c, t or g
tttncacaggaaacagctatgacatgattacgaatttaatacgactcactatagggaatttggccctcgaggccaagaattcggcacgagggccaacttttagtgggtgagaaattttagtttaggtgtttgggatcggacctcagtttctgttgtttcttttatgtggtggtttctatacatgaatcatagccaaaaacttttttggaaacttgttggttgagatagttggttcttttaccccacgaagacatcaagatacacttgtaaataaagctgatagcatatattcatacctgttgtacacttgggtgaaaagtatggcagtgggagactaagatgtattaacctacctgtgaatcatatgttgtaggaaaagctgttcccatgtctaacaggacttgaattcaaagcatgtcaagtggatagtagatctgtggcgatatgagagggatgcagtgcctttccccattcattcctgatggaattgttatactaggttaacatttgtaatttttttctagttgtaatgtgtatgtctggtaaataggtattatattttggccttacaataccgtaacaatgtttgtcattttgaaatacttaatgccaagtaacaatgcatgctttggaaatttggaagatggttttattctttgagaagcaaatatgtttgcattaaatgctttgattgttaaaaaaaaaaaaaaaaaaaaaattggcnggccgnaagcttattccctttagngagggttaattttagcttggc

SEQ ID NO: 979 - DNA, 2457 bp, Homo sapiens
ggagcgcgtgaggctccggcgcgcaagcccggagcagcccgctggggcgcacagggtcgcgcgggcgcggggatggaggacggcgtggccggtccccagctcggggccgcggcggaggcggcggaggcggccgaggcgcgagcgcggcccggggtgacgctgcggcccttcgcgcccctctcgggggcggccgaggcggacgagggcggcggcgactggagcttcattgactgcgagatggaggaggtggacctgcaggacctgcccagcgccaccatcgcctgtcacctggacccgcgcgtgttcgtggacggcctgtgccgggccaaatttgagtccctctttaggacgtatgacaaggacatcacctttcagtattttaagagcttcaaacgagtcagaataaacttcagcaaccccttctccgcagcagatgccaggctccagctgcataagactgagtttctgggaaaggaaatgaagttatattttgctcagaccttacacataggaagctcacacctggctccgccaaatccagacaagcagtttctgatctcccctcccgcctctccgccagtgggatggaaacaagtggaagatgcgaccccagtcataaactatgatctcttatatgccatctccaagctggggccaggggaaaagtatgaattgcacgcagcgactgacaccactcccagcgtggtggtccatgtatgtgagagtgatcaagagaaggaggaagaagaggaaatggaaagaatgaggagacctaagccaaaaattatccagaccaggaggccggagtacacgccgatccacctcagctgaactggcacgcgacgaggacgcattccaaatcatactcacgggaggaatcttttactgtggaggtggctggtcacgacttcttcggaggtggcagccgagatcggggtggcagaaatcccagttcatgttgctcagaagagaatcaaggccgtgtccccttgttctaatgctgcacaccagttactgttcatggcacccgggaatgacttgggccaatcactgagtttgtggtgatcgcacaaggacatttgggactgtcttgagaaaacagataatgatagtgttttgtacttgttcttttctggtaggttctgtctgtgccaagggcaggttgatcagtgagctcaggagagagcttcctgtttctaagtggcctgcaggggccactctctactggtaggaagaggtaccacaggaagccgcctagtgcagagaggttgtgaaaacagcagcaatgcaatgtggaaattgtagcgtttcctttcttccctcatgttctcatgtttgtgcatgtatattactgatttacaagactaacctttgttcgtatataaagttacaccgttgttgttttacatcttttgggaagccaggaaagcgtttggaaaacgtatcacctttcccagattctcggattctcgactctttgcaacagcacttgcttgcggaactcttcctggaatgcattcactcagcatccccaaccgtgcaacgtgtaacttgtgcttttgcaaaagaagttgatctgaaattcctctgtagaatttagcttatacaattcagagaatagcagtttcactgccaacttttagtgggtgagaaattttagtttaggtgtttgggatcggacctcagtttctgttgtttcttttatgtggtggtttctatacatgaatcatagccaaaaacttttttggaaactgttggttgagatagttggttcttttaccccacgaagacatcaagatacacttgtaaataaagctgatagcatatattcatacctgttgtacacttgggtgaaaagtatggcagtgggagactaagatgtattaacctacctgtgaatcatatgttgtaggaaaagctgttcccatgtctaacaggacttgaattcaaagcatgtcaagtggatagtagatctgtggcgatatgagagggatgcagtgcctttccccattcattcctgatggaattgttatactaggttaacatttgtaatttttttctagttgtaatgtgtatgtctggtaaataggtattatattttggccttacaataccgtaacaatgtttgtcattttgaaatacttaatgccaagtaacaatgcatgctttggaaatttggaagatggttttattctttgagaagcaaatatgtttgcattaaatgctttgattgttcatatcaagaaattgattgaacgttctcaaaccctgtttacggtacttggtaagagggagccggtttgggagagaccattgcatcgctgtccaagtgtttcttgttaagtgcttttaaactggagaggctaacctcaaaatattttttttaactgcattctataataaatgggcacagtatgctccttacagaaaaaaaaaaaaaaaaaaaaaaaaaaaaaa

SEQ ID NO: 980 - DNA, 730 bp, Homo sapiens
cacaggaaacagctatgacatgattacgaatttaatacgactcactatagggaatttggccctcgaggccaagaattcggcacgagcggcacgagcaaattctagtagtactcagattgtctgcagttacttttttgtgtgtgtaggtctcatctcccctcaaaatcccagatagattataaatctcttaaacaggaagttagtgtctcttggtgtgtaaccccaccatgctagtccatagtagatgaccagtaagtggttgaatgaatgaaccatctattcttttcacctctttttggggacatctttgcttttcacagaggatagtgctgatttggacagcattgaagcagttgctaatgaagtattgaaaatggagatgcctagcaccccacagcagttacagaacttgacagaagatatacgtgaacgagttgaaagcctttctcaagtagaggttattcttcagcatagtgctgctgacattgccagagctgagatgttgttagaagaagctaaaagagcaaggtatctaaagacatggcatctaaggggcttattttgtgtatctatcatggagtaaaaagtatctctttaaccaatgaaacttctaagaaggacctatgcgagtctctctgggtcatttcaggaaggctattctttaaagaaaagaacactgagagtacttttttcatgttcagcaacaatatactgtctcattattttttac

SEQ ID NO: 981 - DNA, 472 bp, Homo sapiens
ttggccctcgggccagaattcggcacgaggcttccgaggaagctaaggctgcgttggggtgaggccctcacttcatccggcgactagcaccgcgtccggcagcgccagccctacactcgcccgcgccatggcctctgtctccgagctcgcctgcatctactcggccctcattctgcacgacgatgaggtgacagtcacggaggataagatcaatgccctcattaaagcagccggtgtaaatgttgagcctttttggcctggcttgtttgcaaaggccctggccaacgtcaacattgggagcctcatctgcaatgtaggggccggcggacctgctccagcagctggtgctgcaccagcaggaggtcctgccccctccactgctgctgctccagctgaggagaagaaagtggaagcaaagaaagaagaatccgaggagtctgatgatgacatgggctttggtctttctgactaa

SEQ ID NO: 982 - DNA, 512 bp, Homo sapiens
cctttcctcagctgccgccaaggtgctcggtccttccgaggaagctaaggctgcgttggggtgaggccctcacttcatccggcgactagcaccgcgtccggcagcgccagccctacactcgcccgcgccatggcctctgtctccgagctcgcctgcatctactcggccctcattctgcacgacgatgaggtgacagtcacggaggataagatcaatgccctcattaaagcagccggtgtaaatgttgagcctttttggcctggcttgtttgcaaaggccctggccaacgtcaacattgggagcctcatctgcaatgtaggggccggtggacctgctccagcagctggtgctgcaccagcaggaggtcctgccccctccactgctgctgctccagctgaggagaagaaagtggaagcaaagaaagaagaatccgaggagtctgatgatgacatgggctttggtctttttgactaaacctcttttataacatgttcaataaaaagctgaacttt

SEQ ID NO: 983 - DNA, 639 bp, Homo sapiens
ggaaacagctatgacatgattacgaatttaatacgactcactatagggaatttggccctcgaggccaagaattcggcacgaggggctgttgaagacatgagtgacccactgaaccaagaacttactggaagtgtgcctctgtgtctccttcctcgggggtaaggaggggacagtgcttcccaagttccagctgcaagtccaacttaaccaactttccttcaaagtcagttactgccaattttctgaaaaaagcatgttccatatactaagtctcttttctcacggtaggaaataatacagccaagatatgcagcatccttctcattgatgtagaaaattctgcgatagaccagaaaaatcctggcagcttttctccaggcatctgggtcactaaaaactgattttctaaaattattggatttgtattttgttattaagggggaaaatgtgatttgtgcctgatctttcatctgtgattcttataagagctttgtcttcagaaaaactaaaaataaaaggcattgacttaaacagctgaaaaaaaaaaaaaaaaaaaaaaagatgcggccgcaagcttattccctttagtgagggttaattttagcttggcactggccgtcgtttttacaacgtcgtgac

SEQ ID NO: 984 - DNA, 1199 bp, Homo sapiens
gccccgcctctcgcctcgccgcctcgccgtcccgccgccttgccgccctgccaccctgccgccctgccgccctgccgccctgccgccctgccgccggtggtcgctgcccgtggtgctccgtcgcccccgccacctcacgtcctcccgtgcgtcgggagcgtctcggctacaacatgttgggcatgatcaagaactcgctgttcggaagcgtagagacgtggccttggcaggtcctaagcaaaggggacaaggaagaagttgcctatgaagaaagggcctgtgaaggcggcaaatttgccacagtagaagtgacagataagcctgtggatgaggctctacgggaagcaatgcccaaggtcgcaaagtatgcggggggcaccaatgacaagggaattgggatggggatgacagtccctatttcctttgctgtgttccccaatgaagatggctctctgcagaagaaattaaaagtctggttccggattccaaaccaatttcaaagcgacccaccagctcccagtgacaaaagcgttaagattgaggaacgggaaggcatcactgtctattccatgcagtttggtggttatgccaaggaagcagactacgtagcacaagccacccgtctgcgtgctgccctggagggcacagccacctaccggggggacatctacttctgcacgggttatgaccctcccatgaagccctacggacggcgcaatgagatctggctgttgaagacatgagtgacccactgaaccaagaacttactggaagtgtgcctctgtgtctccttcctcgggggtaaggaggggacagtgcttcccaagttccagctgcaagtccaacttaaccaactttccttcaaagtcagttactgccaattttctgaaaaaagcatgttccatatactaagtctcttttctcacagtaggaaataatacagccaagatatgcagcatccttctcattgatgtagaaaattctgcgatagaccagaaaaatcctggcagcttttctccaggcatctgggtcactaaaaactgattttctaaaattattggatttgtattttgttattaagggggaaaatgtgatttgtgcctgatctttcatctgtgattcttataagagctttgtcttcagaaaaactaaaaataaaaggcattgacttaaacagctgagacaaaaaaaaaaaaaaa

SEQ ID NO: 985 - DNA, 674 bp, Homo sapiens
ggaaacagctatgacatgattacgaatttaatacgactcactatagggaatttggccctcgaggccaagaattcggcacgaggattatttcaaaggtatttttatagttcaaatcacttcacttttaccctgataaatataaatgactaggaatgatcttcagctagcctttagcacctgcaaccaatctgacaataatgtgttcatcaggtacctgtggattaaatcacacaccggcatatttaagctgaatgtcagtctggaaaatgaatgtactatattaactgaaataccactctttgtgtaggtattctgtcatatatttaagaaaaattaaatagcatgtaaatcatataacaataacttaagtctttcttcaaagtgcatgtggtcctttgcaatacctcattcagccaagtatttgttctcttcctcattcagtttaaggcagctttcaatttgcttagaaggcaacattagaagggtagagtttaatcagaaacatagaattttaaagtgtgggttcaactgaataaatttgaatttctgtaggaagtaaagaattaaaaatctatttaaagattgcaatatataatcatttttaaagtatttgtttaacctgatgggttttccagaaatgaaaacaagtcagttctaaaaccaaagctgatatt

SEQ ID NO: 986 - DNA, 674 bp, Homo sapiens
acacaggaaacagctatgacatgattacgaatttaatacgactcactatagggaatttggccctcgaggccaagaattcggcacgaggtgttaccattcttgggaggacacttttgccaatgaactctttccccagctgattagtgtctaaggaatgatccaatactgttgcccttttccttgactattacactgcctggaggatagcagagaagcacagttgtcccattgaattatttgagcaaaaactactgtaaataacttttttgtcttttgtcaaataaaatttttttttgtttttttaagcagaaaaaaaaaaaaaaaaaaaaaaaaaaaaaaaaaaaaaaaaaaaaaaaaaaaaaggcggccgcaagcttattccctttagtgagggttaattttagcttggcactggccgtcgttttacaacgtcgtgactgggaaaaccctggcgttacccaacttaatcgccttgcagcacatccccctttcgccagctggcgtaatagcgaagaggcccgcaccgatcgcccttcccaacagttgcgcagcctgaatggcgaatgggacgcgccctgtagcggcgcattaagcgcggcgggtgtggtggttacgcgcagcgtgaccgctacacttgccagcgccctagcgcccgctcctttcgctttcttccc

SEQ ID NO: 987 - DNA, 667 bp, Homo sapiens
gctatgacatgattacgaatttaatacgactcactatagggaatttggccctcgaggccaagaattcggcacgaggcttaccaacttttaaaaacaagtaaagttttggagaatagtaccaagaactcaaatgatcctgcggtattcaaagacaaccccactgaagacgtcgaataccagtgtgttgcagataattgccattcccacgccaaaatgttaagtgaggttctgagggtgaaggtgatagccccggtggatgaggtccagatttctatcctgtcaagtaaggtggtggagtctggagaggacattgtgctgcaatgtgctgtgaatgaaggatctggtcccatcacctataagttttacagagaaaaagagggcaaacccttctatcaaatgacctcaaatgccacccaggcattttggaccaagcagaaggctaacaaggaacaggagggagagtattactgcacagccttcaacagagccaaccacgcctccagtgtccccagaagcaaaatactgacagtcagagtcattcttgccccatggaagaaaggacttattgcagtggttatcatcggagtgatcattgctctcttgatcattgcggccaaatgttattttctgaggaaagccaaggccaagcagatgccagtggaaatgt

SEQ ID NO: 988 - DNA, 3189 bp, Homo sapiens
tttccagccatggctgccattacctgaccagcgccacagccggtctctctgcaggcgccgggagaagtgaccagagcaatttctgcttttcacagggcgggtttctcaacggtgacttgtgggcagtgccttctgctgagcgagtcatggcccgaaggcagaactaactgtgcctgcagtcttcactctcaggatgcagccgaggtgggcccaaggggccacgatgtggcttggagtcctgctgacccttctgctctgttcaagccttgagggtcaagaaaactctttcacaatcaacagtgttgacatgaagagcctgccggactggacggtgcaaaatgggaagaacctgaccctgcagtgcttcgcggatgtcagcaccacctctcacgtcaagcctcagcaccagatgctgttctataaggatgacgtgctgttttacaacatctcctccatgaagagcacagagagttattttattcctgaagtccggatctatgactcagggacatataaatgtactgtgattgtgaacaacaaagagaaaaccactgcagagtaccaggtgttggtggaaggagtgcccagtcccagggtgacactggacaagaaagaggccatccaaggtgggatcgtgagggtcaactgttctgtcccagaggaaaaggccccaatacacttcacaattgaaaaacttgaactaaatgaaaaaatggtcaagctgaaaagagagaagaattctcgagaccagaattttgtgatactggaattccccgttgaggaacaggaccgcgttttatccttccgatgtcaagctaggatcatttctgggatccatatgcagacctcagaatctaccaagagtgaactggtcaccgtgacggaatccttctctacacccaagttccacatcagccccaccggaatgatcatggaaggagctcagctccacattaagtgcaccattcaagtgactcacctggcccaggagtttccagaaatcataattcagaaggacaaggcgattgtggcccacaacagacatggcaacaaggctgtgtactcagtcatggccatggtggagcacagtggcaactacacgtgcaaagtggagtccagccgcatatccaaggtcagcagcatcgtggtcaacataacagaactattttccaagcccgaactggaatcttccttcacacatctggaccaaggtgaaagactgaacctgtcctgctccatcccaggagcacctccagccaacttcaccatccagaaggaagatacgattgtgtcacagactcaagatttcaccaagatagcctcaaagtcggacagtgggacgtatatctgcactgcaggtattgacaaagtggtcaagaaaagcaacacagtccagatagtcgtatgtgaaatgctctcccagcccaggatttcttatgatgcccagtttgaggtcataaaaggacagaccatcgaagtccgttgcgaatcgatcagtggaactttgcctatttcttaccaacttttaaaaacaagtaaagttttggagaatagtaccaagaactcaaatgatcctgcggtattcaaagacaaccccactgaagacgtcgaataccagtgtgttgcagataattgccattcccacgccaaaatgttaagtgaggttctgagggtgaaggtgatagccccggtggatgaggtccagatttctatcctgtcaagtaaggtggtggagtctggagaggacattgtgctgcaatgtgctgtgaatgaaggatctggtcccatcacctataagttttacagagaaaaagagggcaaacccttctatcaaatgacctcaaatgccacccaggcattttggaccaagcagaaggctaacaaggaacaggagggagagtattactgcacagccttcaacagagccaaccacgcctccagtgtccccagaagcaaaatactgacagtcagagtcattcttgccccatggaagaaaggacttattgcagtggttatcatcggagtgatcattgctctcttgatcattgcggccaaatgttattttctgaggaaagccaaggccaagcagatgccagtggaaatgtccaggccagcagtaccacttctgaactccaacaacgagaaaatgtcagatcccaatatggaagctaacagtcattacggtcacaatgacgatgtcggaaaccatgcaatgaaaccaataaatgataataaagagcctctgaactcagacgtgcagtacacggaagttcaagtgtcctcagctgagtctcacaaagatctaggaaagaaggacacagagacagtgtacagtgaagtccggaaagctgtccctgatgccgtggaaagcagatactctagaacggaaggctcccttgatggaacttagacagcaaggccagatgcacatccctggaaggacatccatgttccgagaagaacagatgatccctgtatttcaagacctctgtgcacttatttatgaacctgccctgctcccacagaacacagcaattcctcaggctaagctgccggttcttaaatccatcctgctaagttaatgttgggtagaaagagatacagaggggctgttgaatttcccacatacactccttccaccaagttggaacatccttggaaattggaagagcacaagaggagatccagggcaaggccattgggatattctgaaacttgaatattttgttttgtgcagagataaagaccttttccatgcaccctcatacacagaaaccaattttcttttttatactcaatcatttctagcgcatggcctggttagaggctggttttttctcttttcctttggtccttcaaaggcttgtagttttgggtagtccttgttctttggaaatacacagtgctgaccagacagcctccccctgtcccctctatgacctcgccctccacaaatgggaaaaccagactacttgggagcaccgcctgtgaaataccaacctgaagacacggttcattcaggcaacgcacaaaacagaaaatgaaggtggaacaagcacagatgttcttcaactgtttttgtctacactctttctcttttcctctaccatgctgaaggctgaaagacaggaagatggtgccatcagcaaatattattcttaattgaaaacttgaaaaaaaaaaaaaaaa

SEQ ID NO: 989 - DNA, 700 bp, Homo sapiens
aaacagctatgacatgattacgaatttaatacgactcactatagggaatttggccctcgaggccaagaattcggcacgaggcctcgtgccgcctcgtgccgaagccttagggaagctggcctgagaggggaagcggccctaagggagtgtctaagaacaaaagcgacccattcagagactgtccctgaaacctagtactgccccccggtaatgactccaacttattgatagtgttttatgttcagataatgcccgatgactttgtcatgcagctccaccgattttgagaacgacagcgacttccgtcccagccgtgccaggtgctgcctcagattcaggttatgccgctcaattcgctgcgtatatcgcttgctgattacgtgcagctttcccttcaggcgggattcatacagcggccagccatccgtcatccatatcaccacgtcaaagggtgacagcaggctcataagacgccccagcgtcgccatagtgcgttcaccgaatacgtgcgcaacaaccgtcttccggagactgtcatacgcgtaaaacagccagcgctggcgcgatttagccccgacatagccccactgttcgtccatttccgcgcagacgatgacgtcactgcccggctgtatgcgcgaggttaccgactgcggcctgagttttttaagtgacgtaaaatcgtgttgaggccaacgcc

SEQ ID NO: 990 - DNA, 492 bp, Homo sapiens
cacaggaaacagctatgacatgattacgaatttaatacgactcactatagggaatttggccctcgaggccaagaattcggcacgagggcagaaggcggggatgaagagccagccgtcagagacagagaggctgaccgacgactactgagggggcagacccccggccccgggccacctggagtgacttctttaagcggacccgatattattagatcatgcccaagtaccacgcagtgcggatccgggaggaggagcgctacccacctccagggagcaccctgcccaccaagaagcactgggtgaccagctggcaaactcgggaccaatactactgacgtcctccctgatcccaccccctcctgccccaaagtgccatttcttcctatttatcataagttatgcctctgacagtccacaggggccaccaccttcggctggtagcaccacgctcaggcacatacacctagtcaagagcatgcacatgctgtctgg

SEQ ID NO: 991 - DNA, 4637 bp, Homo sapiens
aggtgaacaggtcctcacgcccagctccgccccctcacgcgctctcgccgggaccccgcttccgctggcagccatgggccccggccccagccgcgcgccccgcgccccacgcctgatgctctgtgcgctcgccttgatggtggcggccggcggctgcgtcgtctccgccttcaacctggatacccgattcctggtagtgaaggaggccgggaacccgggcagcctcttcggctactcggtcgccctccatcggcagacagagcggcagcagcgctacctgctcctggctggtgccccccgggagctcgctgtgcccgatggctacaccaaccggactggtgctgtgtacctgtgcccactcactgcccacaaggatgactgtgagcggatgaacatcacagtgaaaaatgaccctggccatcacattattgaggacatgtggcttggagtgactgtggccagccagggccctgcaggcagagttctggtctgtgcccaccgctacacccaggtgctgtggtcagggtcagaagaccagcggcgcatggtgggcaagtgctacgtgcgaggcaatgacctagagctggactccagtgatgactggcagacctaccacaacgagatgtgcaatagcaacacagactacctggagacgggcatgtgccagctgggcaccagcggtggcttcacccagaacactgtgtacttcggcgcccccggtgcctacaactggaaaggaaacagctacatgattcagcgcaaggagtgggacttatctgagtatagttacaaggacccagaggaccaaggaaacctctatattgggtacacgatgcaggtaggcagcttcatcctgcaccccaaaaacatcaccattgtgacaggtgccccacggcaccgacatatgggcgcggtgttcttgctgagccaggaggcaggcggagacctgcggaggaggcaggtgctggagggctcgcaggtgggcgcctattttggcagcgcaattgccctggcagacctgaacaatgatgggtggcaggacctcctggtgggcgccccctactacttcgagaggaaagaggaagtagggggtgccatctatgtcttcatgaaccaggcgggaacctccttccctgctcacccctcactccttcttcatggccccagtggctctgcctttggtttatctgtggccagcattggtgacatcaaccaggatggatttcaggatattgctgtgggagctccgtttgaaggcttgggcaaagtgtacatctatcacagtagctctaaggggctccttagacagccccagcaggtaatccatggagagaagctgggactgcctgggttggccaccttcggctattccctcagtgggcagatggatgtggatgagaacttctacccagaccttctagtgggaagcctgtcagaccacattgtgctgctgcgggcccggccagtcatcaacatcgtccacaagaccttggtgcccaggccagctgtgctggaccctgcactttgcacggccacctcttgtgtgcaagtggagctgtgctttgcttacaaccagagtgccgggaaccccaactacaggcgaaacatcaccctggcctacactctggaggctgacagggaccgccggccgccccggctccgctttgccggcagtgagtccgctgtcttccacggcttcttctccatgcccgagatgcgctgccagaagctggagctgctcctgatggacaacctccgtgacaaactccgccccatcatcatctccatgaactactctttacctttgcggatgcccgatcgcccccggctggggctgcggtccctggacgcctacccgatcctcaaccaggcacaggctctggagaaccacactgaggtccagttccagaaggagtgcgggcctgacaacaagtgtgagagcaacttgcagatgcgggcagccttcgtgtcagagcagcagcagaagctgagcaggctccagtacagcagagacgtccggaaattgctcctgagcatcaacgtgacgaacacccggacctcggagcgctccggggaggacgcccacgaggcgctgctcaccctggtggtgcctcccgccctgctgctgtcctcagtgcgcccccccggggcctgccaagctaatgagaccatcttttgcgagctggggaaccccttcaaacggaaccagaggatggagctgctcatcgcctttgaggtcatcggggtgaccctgcacacaagggaccttcaggtgcagctgcagctctccacgtcgagtcaccaggacaacctgtggcccatgatcctcactctgctggtggactatacactccagacctcgcttagcatggtaaatcaccggctacaaagcttctttggggggacagtgatgggtgagtctggcatgaaaactgtggaggatgtaggaagccccctcaagtatgaattccaggtgggcccaatgggggaggggctggtgggcctggggaccctggtcctaggtctggagtggccctacgaagtcagcaatggcaagtggctgctgtatcccacggagatcaccgtccatggcaatgggtcctggccctgccgaccacctggagaccttatcaaccctctcaacctcactctttctgaccctggggacaggccatcatccccacagcgcaggcgccgacagctggatccagggggaggccagggccccccacctgtcactctggctgctgccaaaaaagccaagtctgagactgtgctgacctgtgccacagggcgtgcccactgtgtgtggctagagtgccccatccctgatgcccccgttgtcaccaacgtgactgtgaaggcacgagtgtggaacagcaccttcatcgaggattacagagactttgaccgagtccgggtaaatggctgggctaccctattcctccgaaccagcatccccaccatcaacatggagaacaagaccacgtggttctctgtggacattgactcggagctggtggaggagctgccggccgaaatcgagctgtggctggtgctggtggccgtgggtgcagggctgctgctgctggggctgatcatcctcctgctgtggaagtgcggcttcttcaagcgagcccgcactcgcgccctgtatgaagctaagaggcagaaggcggagatgaagagccagccgtcagagacagagaggctgaccgacgactactgagggggcagccccccgcccccggcccacctggtgtgacttctttaagcggacccgctattatcagatcatgcccaagtaccacgcagtgcggatccgggaggaggagcgctacccacctccagggagcaccctgcccaccaagaagcactgggtgaccagctggcagactcgggaccaatactactgacgtcctccctgatcccaccccctcctcccccagtgtcccctttcttcctatttatcataagttatgcctctgacagtccacaggggccaccacctttggctggtagcagcaggctcaggcacatacacctcgtcaagagcatgcacatgctgtctggccctggggatcttcccacaggagggccagcgctgtggaccttacaacgccgagtgcactgcattcctgtgccctagatgcacgtggggcccactgctcgtggactgtgctggtgcatcacggatggtgcatgggctcgccgtgtctcagcctctgccagcgccagcgccaaaacaagccaaagagcctcccaccagagccgggaggaaaaggcccctgcaatgtggtgacacctcccctttcacacctggatccatcttgagagccacagtcactggattgactttgctgtcaaaactactgacagggagcagcccccgggccgctggctggtgggcccccaattgacacccatgccagagaggtggggatcctgcctaaggttgtctacgggggcacttggaggacctggcgtgctcagacccaacagcaaaggaactagaaagaaggacccagaaggcttgctttcctgcatctctgtgaagcctctctccttggccacagactgaactcgcagggagtgcagcaggaaggaacaaagacaggcaaacggcaacgtagcctgggctcactgtgctggggcatggcgggatcctccacagagaggaggggaccaattctggacagacagatgttgggaggatacagaggagatgccacttctcactcaccactaccagccagcctccagaaggccccagagagaccctgcaagaccacggagggagccgacacttgaatgtagtaataggcagggggccctgccaccccatccagccagaccccagctgaaccatgcgtcaggggcctagaggtggagttcttagctatccttggctttctgtgccagcctggctctgcccctcccccatgggctgtgtcctaaggcccatttgagaagctgaggctagttccaaaaacctctcctgacccctgcctgttggcagcccactccccagccccagccccttccatggtactgtagcaggggaattccctccccctccttgtgccttctttgtatataggcttctcaccgcgaccaataaacagctcccagtttgt

SEQ ID NO: 992 - DNA, 658 bp, Homo sapiens
cacaggaaacagctatgacatgattacgaatttaatacgactcactatagggaatttggccctcgaggccaagaattcggcacgagaccagcatctcccagttcataatcacaacccttcagatttgccttattggcagctctactctggaggtttgtttagaagaagtgtgtcacccttaggccagcaccatctctttacctcctaattccacaccctcactcgctgtagacatttgctatgagctggggatgtctctcatgaccaaatgcttttcctcaaagggagagagtgctattgtagagccagaggtctggccctatgcttccggcctcctgtccctcatccatagcacctccacatacctggccctgagccttggtgtgctgtatccatccatggggctgattgtatgtaccttctacctcttggctgccttgtgaaggaattattcccatgagttggctgggaataagtgccaggatggaatgatgggtcagctgtatcagcacgtgtggcctgttcttctatgggttggacaacctcattgtaactcactctttaatctgagaggccacagcgcaattttattttatttttctcatgatgaggttttcttaacttaaaagaacatggatataaacatgctagcattata

SEQ ID NO: 993 - DNA, 528 bp, Homo sapiens
gctatgacatgattacgaatttaatacgactcactatagggaatttggccctcgaggccaagaattcggcacgaggtttttaccaaaaaccaaaaccagcttccatttattgatgggccccaccccctgacgtcctggggagaggggccccccaaagagcctttctctctgggacaaaatacaaatggcaggaagggtccatacagaaaagaacgtctctgaggtccttgcgtttttaataaaatggtaagagtctttcgtgtggggcctcccagctgggcaagccttgattggccaggagtccaggtgcccgaggtgtgacctcagcccctcgccctgagcaggggcgctgggcagaagcctaggcccgcagagaggcccggggctgccgccccatcacacgctcatggtcatccctggcgagtagctttcgctcgggaacgggtgcaggaaggtcccggcggccgcaagcttattccctttagtgagggttaattttagcttggcactggccgtcgttttacaacg

SEQ ID NO: 994 - DNA, 1884 bp, Homo sapiens
ttaagagctgcgcccgcgggcggcgtagaggcagcgggcgggggcgcgcgcggcgggaggaggggagcgcgcgtttcccggaacagcccgcgcggaggaaagggaggaaaaaaagccaccctgcggccggggccggagctggagccgccgctgccgccgccgccgcggccgtctggagctcccccgcgcggacgatgcctgccgtgcccgcctggggctcggggcggtgaggcccggggcgcggggtagctatggcgacggcaagcgcggcccgcggcgccgcctgacaggtgtgggccccggcggcggcggcgtggagcagcatgtacgccaaggggggcaagggttcggccgtgccctccgacagccaggcccgcgagaagttggcgctgtacgtttatgagtacctgctgcacatcggtgcccagaagtcagcccagaccttcctgtctgagatccgatgggagaagaacatcacgctgggggagccccctgggttcctgcactcctggtggtgcgtcttctgggacctgtactgcgcggcgcctgacagaagagaggcctgcgagcactccggcgaggccaaggccttccaggactatagtgctgcagccgcccccagccccgttatggggagtatggccccaggtgacacaatggccgcaggctccatggcggctggcttcttccagggcccccccggctcccagccgtccccccacaaccccaacgcccccatgatggggcctcacggtcagcccttcatgtcaccgcgcttcccagggggcccccggcccaccctgcggatgccgagtcagcctcccgcaggcctccctggctcccagcccctcctccctggcgccatggagccctccccacgagcccaggggcatccgagcatgggcggcccaatgcagagggtgacgcctcctcgtggcatggccagcgtggggccccagagctatggaggtggcatgcgacccccacccaactccctcgccggcccaggcctgcctgccatgaacatgggcccaggagttcgtggcccgtgggccagccccagtggaaactcgatcccctactcctcctcatcccccggcagctacaccggacccccaggaggaggtgggccccctggaacacccatcatgcctagccctggagattccaccaactccagcgaaaacatgtacactatcatgaaccccatcgggcagggcgccggcagggctaatttcccgctcggccctggcccggagggccccatggccgccatgagcgcgatggagcctcaccacgtgaacggatccctgggctcgggcgacatggacgggttgccgaagagttcccccggcgccgtggccggcctgagcaacgccccgggcaccccgcgggacgacggcgagatggcggccgccgggaccttcctgcacccgttcccgagcgaaagctactcgccagggatgaccatgagcgtgtgatggggcggcagccccgggcctctctgcgggcctaggcttctgcccagcgcccctgctcagggcgaggggctgaggtcacacctcgggcacctggactcctggccaatcaaggcttgcccagctgggaggccccacacgaaagactcttaccattttattaaaaacgcaaggacctcagagacgttcttttctgtatggacccttcctgccatttgtattttgtcccagagagaaaggctctttggggggcccctctccccaggacgtcagggggtggggcccataaataaatggaagctggttttggtttttggtagcttgtctcagattccctctttggccttctgccaccacactctccaccctgtggtcttgttccgtccccgcccccatctagccccac

SEQ ID NO: 995 - DNA, 709 bp, Homo sapiens
cacaggaaacagctatgacatgattacgaatttaatacgactcactatagggaatttggccctcgaggccaagaattcggcacgagaccagcatctcccagttcataatcacaacccttcagatttgccttattggcagctctactctggaggtttgtttagaagaagtgtgtcacccttaggccagcaccatctctttacctcctaattccacaccctcactgctgtagacatttgctatgagctggggatgtctctcatgaccaaatgcttttcctcaaagggagagagtgctattgtagagccagaggtctggccctatgcttccggcctcctgtccctcatccatagcacctgcacatacctggccctgagccttggtgtgctgtatccatccatggggctgattgtatttaccttctacctcttggctgccttgtgaaggaattattcccatgagttggctgggaataagtgccaggatggaatgatgggtcagctgtatcagcacgtgtggcctgttcttctatgggttggacaacctcattttaactcagtctttaatctgagaggccacagagcaattgtattttatttttctcatgatgaggttctcttaacttaaaagaacatgtatataaacatgcttgcattatatttgtaaatttatgtgatggcaaagaatgagagcataggaaaccacacagac

SEQ ID NO: 996 - DNA, 724 bp, Homo sapiens
tgacctgattacgccaagcttggcacgaggagcttttagctgccagccctggcccatcatgtagctgcagcacagccttccctaacgttgcaactgggggaaaaatcactttccagtctgttttgcaaggtgtgcatttccatcttgattccctgaaagtccatctgctgcatcggtcaagagaaactccacttgcatgaagattgcacgcctgcagcttgcatctttgttgcaaaactagctacagaagagaagcaaggcaaagtcttttgtgctcccctcccccatcaaaggaaaggggaaaatgtctcagtcgaaaggcaagaagcgaaaccctggccttaaaattccaaaagaagcatttgaacaacctcagaccagttccacaccacctcgagatttagactccaaggcttgcatttctattggaaatcagaactttgaggtgaaggcagatgacctggagcctataatggaactgggacgaggtgcgtacggggtggtggagaagatgcggcacgtgcccagcgggcagatcatggcagtgaagcggatccgagccacagtaaatagccaggaacagaaacggctactgatggatttggatatttccatgaggacggtggactgtccattcactgtcaccttttatggcgcactgtttcgggagggtgatatgtggatctgcatggagctcatggatacatcactagataaattctac

SEQ ID NO: 997 - DNA, 2924 bp, Homo sapiens
ggcttctggttcggcccacctctgaaggttccagaatcgatagtgaattcgtggttccaagtttggagcttttagctgccagccctggcccatcatgtagctgcagcacagccttccctaacgttgcaactgggggaaaaatcactttccagtctgttttgcaaggtgtgcatttccatcttgattccctgaaagtccatctgctgcatcggtcaagagaaactccacttgcatgaagattgcacgcctgcagcttgcatctttgttgcaaaactagctacagaagagaagcaaggcaaagtcttttgtgctcccctcccccatcaaaggaaaggggaaaatgtctcagtcgaaaggcaagaagcgaaaccctggccttaaaattccaaaagaagcatttgaacaacctcagaccagttccacaccacctcgagatttagactccaaggcttgcatttctattggaaatcagaactttgaggtgaaggcagatgacctggagcctataatggaactgggacgaggtgcgtacggggtggtggagaagatgcggcacgtgcccagcgggcagatcatggcagtgaagcggatccgagccacagtaaatagccaggaacagaaacggctactgatggatttggatatttccatgaggacggtggactgtccattcactgtcaccttttatggcgcactgtttcgggagggtgatgtgtggatctgcatggagctcatggatacatcactagataaattctacaaacaagttattgataaaggccagacaattccagaggacatcttagggaaaatagcagtttctattgtaaaagcattagaacatttacatagtaagctgtctgtcattcacagagacgtcaagccttctaatgtactcatcaatgctctcggtcaagtgaagatgtgcgattttggaatcagtggctacttggtggactctgttgctaaaacaattgatgcaggttgcaaaccatacatggcccctgaaagaataaacccagagctcaaccagaagggatacagtgtgaagtctgacatttggagtctgggcatcacgatgattgagttggccatccttcgatttccctatgattcatggggaactccatttcagcagctcaaacaggtggtagaggagccatcgccacaactcccagcagacaagttctctgcagagtttgttgactttacctcacagtgcttaaagaagaattccaaagaacggcctacatacccagagctaatgcaacatccatttttcaccctacatgaatccaaaggaacagatgtggcatcttttgtaaaactgattcttggagactaaaaagcagtggacttaatcggttgaccctactgtggattggtgggtttcggggtgaagcaagttcactacagcatcaatagaaagtcatctttgagataatttaaccctgcctctcagagggttttctctcccaattttctttttactccccctcttaagggggccttggaatctatagtatagaatgaactgtctagatggatgaattatgataaaggcttaggacttcaaaaggtgattaaatatttaatgatgtgtcatatgagtcctcaagcttctcagacttctcttattctttacaaaatgaatgcattggccctgacaaaaaggtgctacggtagtgatgaaattataagtagatttgtagtttgtcccatttattattttaatatttatgtttaagtgcttggttgaaaagattccattttatacaagaagggagattcaaaaaaaaaatataaggttgggttagcaatatttatagggcttttattttttaagttcaattgtgtctgtggtccagaagaaattatttaatatgcatctttgagaatattataaaaatatcaaaaaggagctcttcttgtgaaatgtctgttccagctgttgtgactgctgccatttttggaaacatctgcccaatcctgggtgatcaccacatcttttaggggaagtgacaagatgctctggtcatactctttttcccaactttggaaaacataaaaatcactcatataacagctcaaagagtaaaacatttggttcttctgacacttgtggtatagtattagtggaaagtgatttgtaatatgattttatatccacctacctattcatctacctgtgtgtatgtgtgtgtttgtgtgtctatttggcaattcacaagtcctgccaagtggtttctatgagcatctctgtttggtaaggaggacaattgtcagttttgagggggacatgtgttaaatcacagaaaaaaatggtgccttcttctgcgtttgtccctcctgccatgtgtaagttgtaaggattgcctttgtagttaatgtactctttggctttgtttgtttgttttcttcttcagtgaagcagccttactattcatagaagggctagaataggagaaaatgaaaggtagtgagtaattctttgataagatgaggaaataatgggaaaggttgaattaattcctgggcatggactaccagatgaccacaagttgcgttgaggccgcatctttcttcagcagcgtgcaatagctggctcctctataggagatgagcttcattgggagttcctagcaagttgactaaacagcaaaagttctttctcgtgggtaaatatacccacaggttctatgatttgtagctctaggtttcttgatgatcaaggagtgaagtaattgacagggaaaatatagacctatgataaataaccaggaagcattgcttttggacaaggaagaacagagggttttgattttaaaaagaagaaaaaaaaaccttattttttctttcttggcctcaagttcaatatggagaggattgcttccctgaatcctctcttccttccccttttagag

SEQ ID NO: 998 - DNA, 756 bp, Homo sapiens
gctatgacatgattacgaatttaatacgactcactatagggaatttggccctcgaggccaagaattcggcacgagggttacatataccatcacagtttgattagaatcagcctcaagagctggcacatgcttgtgaacttgtgctttcatattttcctaacctgtgtggtctttgtgggaggaataacccagactaggaatgccagcatctgccaagcagttgggataattcttcactattccacccttgccacagtactatgggtaggagtgacagctcgaaatatctacaaacaagtcactaaaaaagctaaaagatgccaggatcctgatgaaccaccacctccaccaagaccaatgctcagattttacctgattggtggtggtatccccatcattgtttgcggcataactgcagcagcgaacattaagaattacggcagtcggccaaacgcaccctattgctggatggcatgggaaccctccttgggagccttctatgggccagccagcttcatcacttttgtaaactgcatgtactttctgagcatatttattcagttgaaaagacaccctgagcgcaaatatgagcttaaggagcccacggaggagcaacagagattggcagccaatgaaaatggcgaaataaatcatcaggattcaatgtctttgtctctgatttctacatcagccttggaaaatgagcacacttttcattctcagctcttgggggccagccttactttgctcttatat

SEQ ID NO: 999 - DNA, 4576 bp, Homo sapiens
cggcagaggaggaggaggaggcggtgctcgcgccgggcggtagagcggcgctgggacccatgcggccgtgacccccggctccctagaggcccagcgcagccgcagcggacaaaggagcatgtccgcgccggggaaggcccgtcctccggccgccataaggctccggtcgccgctgggcccgcgccgcgctcctgcccgcccgggctccggggcggcccgctaggccagtgcgccgccgctcgccccgcaggccccggcccgcagcatggagccacccggacgccggcggggccgcgcgcagccgccgctgttgctgccgctctcgctgttagcgctgctcgcgctgctgggaggcggcggcggcggcggcgccgcggcgctgcccgccggctgcaagcacgatgggcggccccgaggggctggcagggcggcgggcgccgccgagggcaaggtggtgtgcagcagcctggaactcgcgcaggtcctgcccccagatactctgcccaaccgcacggtcaccctgattctgagtaacaataagatatccgagctgaagaatggctcattttctgggttaagtctccttgaaagattggacctccgaaacaatcttattagtagtatagatccaggtgccttctggggactgtcatctctaaaaagattggatctgacaaacaatcgaataggatgtctgaatgcagacatatttcgaggactcaccaatctggttcggctaaacctttcggggaatttgttttcttcattatctcaaggaacttttgattatcttgcgtcattacggtctttggaattccagactgagtatcttttgtgtgactgtaacatactgtggatgcatcgctgggtaaaggagaagaacatcacggtacgggataccaggtgtgtttatcctaagtcactgcaggcccaaccagtcacaggcgtgaagcaggagctgttgacatgcgaccctccgcttgaattgccgtctttctacatgactccatctcatcgccaagttgtgtttgaaggagacagccttcctttccagtgcatggcttcatatattgatcaggacatgcaagtgttgtggtatcaggatgggagaatagttgaaaccgatgaatcgcaaggtatttttgttgaaaagaacatgattcacaactgctccttgattgcaagtgccctaaccatttctaatattcaggctggatctactggaaattggggctgtcatgtccagaccaaacgtgggaataatacgaggactgtggatattgtggtattagagagttctgcacagtactgtcctccagagagggtggtaaacaacaaaggtgacttcagatggcccagaacattggcaggcattactgcatatctgcagtgtacgcggaacacccatggcagtgggatatatcccggaaacccacaggatgagagaaaagcttggcgcagatgtgatagaggtggcttttgggcagatgatgattattctcgctgtcagtatgcaaatgatgtcactagagttctttatatgtttaatcagatgcccctcaatcttaccaatgccgtggcaacagctcgacagttactggcttacactgtggaagcagccaacttttctgacaaaatggatgttatatttgtggcagaaatgattgaaaaatttggaagatttaccaaggaggaaaaatcaaaagagctaggtgacgtgatggttgacattgcaagtaacatcatgttggctgatgaacgtgtcctgtggctggcgcagagggaagctaaagcctgcagtaggattgtgcagtgtcttcagcgcattgctacctaccggctagccggtggagctcacgtttattcaacatattcacccaatattgctctggaagcttatgtcatcaagtctactggcttcacggggatgacctgtaccgtgttccagaaagtggcagcctctgatcgtacaggactttcggattatgggaggcgggatccagagggaaacctggataagcagctgagctttaagtgcaatgtttcaaatacattttcgagtctggcactaaagaatactattgtggaggcttctattcagcttcctccttcccttttctcaccaaagcaaaaaagagaactcagaccaactgatgactctctttacaagcttcaactcattgcattccgcaatggaaagctttttccagccactggaaattcaacaaatttggctgatgatggaaaacgacgtactgtggttacccctgtgattctcaccaaaatagatggtgtgaatgtagatacccaccacatccctgttaatgtgacactgcgtcgaattgcacatggagcagatgctgttgcagcccggtgggatttcgatttgctgaacggacaaggaggctggaagtcagatgggtgccatatactctattcagatgaaaatatcactacgattcagtgctactcccttagtaactatgcagttttaatggatttgacgggatctgaactatacacccaggcggccagcctcctgcatcctgtggtttatactaccgctatcattctcctcttatgtctcttagccgtcattgtcagttacatataccatcacagtttgattagaatcagcctcaagagctggcacatgcttgtgaacttgtgctttcatattttcctaacctgtgtggtctttgtgggaggaataacccagactaggaatgccagcatctgccaagcagttgggataattcttcactattccacccttgccacagtactatgggtaggagtgacagctcgaaatatctacaaacaagtcactaaaaaagctaaaagatgccaggatcctgatgaaccaccacctccaccaagaccaatgctcagattttacctgattggtggtggtatccccatcattgtttgcggcataactgcagcagcgaacattaagaattacggcagtcggccaaacgcaccctattgctggatggcatgggaaccctccttgggagccttctatgggccagccagcttcatcacttttgtaaactgcatgtactttctgagcatatttattcagttgaaaagacaccctgagcgcaaatatgagcttaaggagcccacggaggagcaacagagattggcagccaatgaaaatggcgaaataaatcatcaggattcaatgtctttgtctctgatttctacatcagccttggaaaatgagcacacttttcattctcagctcttgggggccagccttactttgctcttatatgttgcactgtggatgtttggggctttggctgtttctttgtattaccctttggacttggtttttagcttcgtttttggagccacaagtttaagcttcagtgcgttcttcgtggtccaccattgtgttaatagggaggatgttagacttgcgtggatcatgacttgctgcccaggacggagctcgtattcagtgcaagtcaacgtccagccccccaactctaatgggacgaatggagaggcacccaaatgccccaatagcagtgcggagtcttcatgcacaaacaaaagtgcttcaagcttcaaaaattcctcccagggctgcaaattaacaaacttgcaggcggctgcagctcagtgccatgccaattctttacctttgaactccacccctcagcttgataatagtctgacagaacattcaatggacaatgatattaaaatgcacgtggcgcctttagaagttcagtttcgaacaaatgtgcactcaagccgccaccataaaaacagaagtaaaggacaccgggcaagccgactcacagtcctgagagaatatgcctacgatgtcccaacgagcgtggaaggaagcgtgcagaacggcttacctaaaagccggctgggcaataacgaaggacactcgaggagccgaagagcttatttagcctacagagagagacagtacaacccaccccagcaagacagcagcgatgcttgtagcacacttcccaaaagtagcagaaattttgaaaagccagtttcaaccactagtaaaaaagatgcgttaaggaagccagctgtggttgaacttgaaaatcagcaaaaatcttatggcctcaacttggccattcagaatggaccaattaaaagcaatgggcaggagggacccttgctcggtaccgatagcactggcaatgttaggactggattatggaaacacgaaactactgtgtaacattgctgggcttcctaggcagaaattcatataaactgtgatactcacattccttgaagctatgagcatttaaaaactgtttacagccaccatagggattcaaaagaatttggaataaactttgaagttttggattttacttatttttatccccaaattgttgctattttttaggatctgaaacaaaatctttctaaaacattgttttagttgtcaaagcaccaacaggacattttgggatgtgaaatgtaatttcttggaatctgtaatttgtacttaatatttcaggcttgtatttaatataataaataggtgtttgttattgtgtcaaaaaaaaaaaaaaaa

SEQ ID NO: 1000 - DNA, 703 bp, Homo sapiens
gctatgacatgattacgaatttaatacgactcactatagggaatttggccctcgaggccaagaattcggcacgaggagatctttcaggaaagacggattgcattagaaatagacagtatatttatagtcacaagagcccagcagggcctcaaagttggggcaggctggctggcccgtcatgttcctcaaaagcacccttgacgtcaagtctccttcccctttccccactccctggctctcagaaggtattccttttgtgtacagtgtgtaaagtgtaaatcctttttctttataaactttagagtagcatgagagaattgtatcatttgaacaactaggcttcagcatatttatagcaatccatgttagtttttactttctgttgccacaaccctgttttatactgtacttaataaattcagatatatttttcacagtttttccaaaaaaaaaaaaaaaaaaaaaaagatgcggccgcaagcttattccctttagtgagggttaattttagcttggcactggccgtcgttttacaacgtcgtgactgggaaaaccctggcgttacccaacttaatcgccttgcagcacatccccctttcgccagctggcgtaatagcgaagaggcccgcaccgatcgcccttcccaacagttgcgcagcctgaatggcgaatgggacgcgccctgtagcggcgcattaagcgc

SEQ ID NO: 1001 - DNA, 763 bp, Homo sapiens
gctatgacatgattacgaatttaatacgactcactatagggaatttggccctcgaggccaagaattcggcacgagggttacatataccatcacagtttgattagaatcagcctcaagagctggcacatgcttgtgaacttgtgctttcatattttcctaacctgtgtggtctttgtgggaggaataacccagactaggaatgccagcatctgccaagcagttgggataattcttcactattccacccttgccacagtactatgggtaggagtgacagctcgaaatatctacaaacaagtcactaaaaaagctaaaagatgccaggatcctgatgaaccaccacctccaccaagaccaatgctcagattttacctgattggtggtggtatccccatcattgtttgcggcataactgcagcagcgaacattaagaattacggcagtcggccaaacgcaccctattgctggatggcatgggaaccctccttgggagccttctatgggccagccagcttcatcacttttgtaaactgcatgtactttctgagcatatttattcagttgaaaagacaccctgagcgcaaatatgagcttaaggagcccacggaggagcaacagagattggcagccaatgaaaatggcgaaataaatcatcaggattcaatgtctttgtctctgatttctacatcagccttggaaaatgagcacacttttcattctcagctcttgggggccagccttactttgctcttatatgttgcac

SEQ ID NO: 1002 - DNA, 630 bp, Homo sapiens
gctatgacatgattacgaatttaatacgactcactatagggaatttgtccgtggaggccagaattaaaacgcgcgcagcgctctggcacctggcgtccgagccgtggagctcgagcggcagatcgagagcacagagacttcttgccatggctgccgtaagaatttcttcctgtccaagatccggtcccacgtggctacttgttccaaataccagaattacatcatggaaggtgtgaaggccaccattaaggatgcatctcttcagccaaggaatgttccaaaccgttacacctttccttgtccttactgtcctgagaagaactttgatcaggaaggacttgtggaacactgcaaattattccatagcacggataccaaatctgtggtttgtccgatatgtgcctcgatgccctggggagaccccaactaccgcagcgccaacttcagagagcacatccagcgccggcaccggttttcttatgacacttttgtggattatgatgttgatgaagaggacatgatgaatcaggtgttgcagcgctccatcatcgaccagtgagcagagtccgtgcttgctatctgtctcatgttacagagcttccattacatattaaacgtgaaatctaaaaa

SEQ ID NO: 1003 - DNA, 2478 bp, Homo sapiens
atcggccgccgttgcgcggcgcagagcggcagcaagatggcggcgcaacagcgggactgcgggggtgctgcgcagctggcggggccggcggcggaggctgaccccctaggacgcttcacgtgtcccgtgtgcttagaggtgtacgagaagccggtacaggtgccctgcggacacgtcttttgctctgcatgcctgcaggaatgtctgaagccgaagaagcctgtctgtggggtgtgtcgcagcgctctggcacctggcgtccgagccgtggagctcgagcggcagatcgagagcacagagacttcttgccatggctgccgtaagaatttcttcctgtccaagatccggtcccacgtggctacttgttccaaataccagaattacatcatggaaggtgtgaaggccaccattaaggatgcatctcttcagccaaggaatgttccaaaccgttacacctttccttgtccttactgtcctgagaagaactttgatcaggaaggacttgtggaacactgcaaattattccatagcacggataccaaatctgtggtttgtccgatatgtgcctcgatgccctggggagaccccaactaccgcagcgccaacttcagagagcacatccagcgccggcaccggttttcttatgacacttttgtggattatgatgttgatgaagaggacatgatgaatcaggtgttgcagcgctccatcatcgaccagtgagcagagtccgtgcttgctatctgtctcatgttacagagcttccattacatattaaacgtgaaatctatgactcctgtaccttacctgttcaacagacctgaaaatgagccatggcattgggacagggtcacttctgacaggggaagtgggtccccaggtcagcccttctcttccctttgggctcttgccaaagctgtcttcccctactgttaaccttgtttgtcacacggtcgagttcgtattggttctcggctacttcctggagcttctgccgcctcctgtggaagataatctagcttctccacctcttgtttcacactcattcctcccatccagtgtttgtctctcgggtccttcaagccagccaggaccttttctgggtcatgaatagcacaatgaagcaagtgtctcctttccttgtccccaaggtgtgcagactttggcagccgtgcacctgaccagagctgaagctcccgctgggctgtggggttgccagaagctggggttgccatcccggggtacatgtcaccagtcctcttggggttttgtaccatctgatgctggaagttttgattagtgatattttctactactacatatttagagttcactggttcagtcttaaatgcctgcatggtgcctttttaggataaggtataaccatacatttttggtggaagtgtttctgggttagggaagttaaagtctgtttatccgtaagtggggaggagggtcagctaagagaagtgggagggccagagctttttggttctgatttacaaattaatgaagtagtttcaaacaacgcggtcatgtttacctctccatttgggagcctgcctacattcttgttctagaagcacaaaaaatcctcagatgaattagaagaaagaggtttggggactcagcggatactagttcttttaccttctgcttggtaacttagattaaactgagcattgtttttctgtcacaaatgttttccttatgacactggtttcgacatgtaaaatgtgtttgaaaacctgctttgtagatgcagagagaagctataggaaacccagtaccacccctggtctgttctgacgagacatcgttcataaggcacagcacatcgcaagatgaacagttgttaataaaagctgttgctggaaacttgctttaggaacagctcaagaaccttggagttcatatttcacaaatattaataaatataagtccaagagctgtcagcctaatctgtaggagcagaacctctgattgaccaaaaggcatatgggtttaggttggttttttgatgtcatatgtctctgatggggctgcaagtgctacctcgcgcttgtacactgctgctgtggggctccgcgcctgccggtgaagagctgcagatgccgagaagccagcaaacacagggcccactggaaaaaaatagttttttcattagtatttctcgggaggacccaaaagttaaggtcagcttgttcactgtaatttctggaagaagttcactcagaccttcctgaattcagatcatctcagaagtctggagggaaatctggcgaaaccttcgtttgagggactgatgtgagtgtatgtccacctcactggtggcaccgagaaacttacttccttgtattaagtgcacttcttgtatttctaataagatgactttccagaaagtgagatttgttatgttctggcttttaaaaggtaaaatataaataaatttcataacttaatctaaaaaaaaaaaaa

SEQ ID NO: 1004 - DNA, 1308 bp, Homo sapiens
  modified_base (1)..(1): a, c, t or g
  modified_base (17)..(17): a, c, t or g
  modified_base (596)..(597): a, c, t or g
  modified_base (646)..(651): a, c, t or g
  modified_base (661)..(662): a, c, t or g
  modified_base (666)..(668): a, c, t or g
  modified_base (675)..(677): a, c, t or g
  modified_base (681)..(682): a, c, t or g
  modified_base (689)..(690): a, c, t or g
  modified_base (698)..(698): a, c, t or g
  modified_base (712)..(712): a, c, t or g
  modified_base (720)..(720): a, c, t or g
  modified_base (723)..(726): a, c, t or g
  modified_base (735)..(735): a, c, t or g
  modified_base (742)..(753): a, c, t or g
  modified_base (759)..(1308): a, c, t or g
ntaataacgactactangggaatttggccctcgaggccaagaattcggcacgaggatccagttggaggttctccctggctcctgcaggcctgcggggatctctccccacttcaggcctccggccagctgcctgccctcttgtctgtgcttcagccctgcacaaaagcagcttggtgacaccactcagccacccagagtacgtgtttacaggctttccagatcaccttcctgtggggtgaacgtaatgaggcggggctggtccttggaatttcccctggaaaatggtaacagactccatccttgacccggggatgagcatgaaggcattgtcccaaaggcagaggccaccgtggtaggaattccaccaaggccagaagggaaaaaggaagaacccaccgtgtctggctgtgcgggccctggggagggtcgtgagtgcagcccctctctacttctgtgcctttgtaaaacgtgtagataaccgcagtggttggctgagccaagaactctcctaaatcagtggctttctccccaccccttgctggggagtcatttttaaaaaaatctgtgggatataaaattggcctcctgctgcttcnnaaaaaaaaaaaaaaaaaaaaaaaaaaaaaaaaaaaaaaaaaaaaaaaannnnnngggggggggnncccnnnttttttnnntttnnggggganntttttttngggggggggggggntttttttnaannnnggggggggnaaaaaannnnnnnnnnnnaaaaannnnnnnnnnnnnnnnnnnnnnnnnnnnnnnnnnnnnnnnnnnnnnnnnnnnnnnnnnnnnnnnnnnnnnnnnnnnnnnnnnnnnnnnnnnnnnnnnnnnnnnnnnnnnnnnnnnnnnnnnnnnnnnnnnnnnnnnnnnnnnnnnnnnnnnnnnnnnnnnnnnnnnnnnnnnnnnnnnnnnnnnnnnnnnnnnnnnnnnnnnnnnnnnnnnnnnnnnnnnnnnnnnnnnnnnnnnnnnnnnnnnnnnnnnnnnnnnnnnnnnnnnnnnnnnnnnnnnnnnnnnnnnnnnnnnnnnnnnnnnnnnnnnnnnnnnnnnnnnnnnnnnnnnnnnnnnnnnnnnnnnnnnnnnnnnnnnnnnnnnnnnnnnnnnnnnnnnnnnnnnnnnnnnnnnnnnnnnnnnnnnnnnnnnnnnnnnnnnnnnnnnnnnnnnnnnnnnnnnnnnnnnnnnnnnnnnnnnnnnnnnnnnnnnnnnnnnnnnnnnnnnnnnnnnnnnnnnnnnnnnnnnnnnnnnnnnnnnnnnnnnnnnnnnnnnnnnnnnnnnnnnnnnnnn

SEQ ID NO: 1005 - DNA, 2760 bp, Homo sapiens
atggccgccgacgtcttcatgtgctccccgcgccggcctcgcagccggggccgccaggtgctgctcaagccccaggtgtccgaggacgacgacgactcggacacggatgagccgtccccgccgcccgcctccggcgcggccaccccggcccgggcccacgcgagcgccgcgccaccgccgcctcgggccgggccgggccgcgaggaacctccgcgccgccagcagatcatccacagcggccacttcatggtgtcgtcgccgcaccgagagcacccgcccaagaagggctacgatttcgacacggtcaacaaacagacgtgccagacctacagcttcggcaagactagctcctgccacctgtccatcgacgcctcgctcaccaagctcttcgagtgcatgactttggcctacagtgggaagttggtgtctccaaagtggaagaatttcaagggcctgaagctacagtggagagacaagatccggctcaataatgccatctggcgggcctggtacatgcagtatctggagaagcgcaagaatcctgtgtgccactttgtgacacccctggacggctctgtggacgtagacgagcaccgccggccggaggccatcaccacggaagggaagtactggaagagccgcatcgagattgtgatccgggagtatcacaagtggagaacctacttcaagaaaaggctacagcagcacaaggatgaggacctctccagcctggtccaggacgatgacatgctgtattggcacaagcacggggatggatggaagacccccgtccccatggaggaggatcccctgctggacacagacatgctcatgtcggaattcagcgacaccctcttctccacactttcttcacaccagccggtggcctggcccaatccccgggaaatagcacatctgggaaatgcagacatgatccagccgggactgattcctttgcagcctaacctggacttcatggacacctttgagcctttccaggacctcttctcttctagccgctccatttttggctccatgctacctgcatctgcctcagcacctgtaccagatcccaacaacccacctgcacaggagagcatcctgccgaccacagccctccccactgtgagccttcctgacagcctcatcgcgccccctaccgccccatccctggctcacatggatgggcagggctgtgaacacacctcccggactgaggacccgtttatccagcccacggacttcggtccctcagagccgccactgagtgtcccgcagcccttcctccctgtcttcaccatgcccctgctgtctcccagccccgccccaccgcccatctcccccgtgttaccattagttcctcctcctgccactgccctgaaccccccggctccacccaccttccatcagccacagaagtttgctggagtcaacaaagcgccgtctgtcatcacccacacggcctctgccaccctcacccacgatgcccccgccaccacctttagccagagtcagggccttgtgatcaccacccatcaccctgccccgtcagcggccccttgtgggctggcactgtctcctgtcacccggcctccccagccacggttaacttttgtgcaccccaaacctgtatccttgactgggggcaggcctaagcagccccacaaaatagtgcctgctcccaaaccagagcccgtgtccttggtgttgaagaatgcccgtatcgccccagctgccttttcaggccaaccacaagcggtgatcatgacgtcagggcctctgaagagagaagggatgttggcctccaccgtgtcccagtccaacgtggtcattgcgcctgctgccatcgccagggctcctggggtcccggagttccacagcagcatcctggtgacagatctcggccatggcacgagcagcccgcctgcccccgtctcccggctcttcccaagcacagcgcaagaccccctggggaagggcgagcaggtcccgctgcatgggggcagcccccaggtcactgtcacagggcccagtcgggactgcccaaactcagggcaggcctctccgtgtgcatcggagcagagccccagtcctcaatctccccagaacaactgctcagggaaatccgaccccaaaaatgtggctgcactaaagaaccggcagatgaagcacatctcagctgagcagaaaaggcgcttcaacatcaagatgtgcttcgacatgctcaacagcctcatctccaacaattccaagctgaccagtcacgccatcacactgcagaagaccgtggagtacatcaccaagctgcagcaggagagaggccagatgcaggaggaggcccggcggctgcgggaggagatcgaggagctcaatgccaccatcatctcctgccagcagctgctccctgccacgggagtccccgttacccggcgccagtttgatcacatgaaagacatgtttgacgaatacgtgaaaacccggaccttgcagaattggaagttctggattttcagcatcatcatcaagccgctgtttgagtcgttcaagggcatggtgtccaccagcagcctggaggagctgcaccggacggcgctctcctggctggaccagcactgctccctgcccatcctcaggccgatggtattgagcacgctgcggcagctgagcacctccacctccatcctcacagacccggcacagctgccagagcaggcgtccaaggctgtcaccaggattggcaagagattgggagagtcctag

SEQ ID NO: 1006 - DNA, 1057 bp, Homo sapiens
  modified_base (1)..(1): a, c, t or g
  modified_base (7)..(7): a, c, t or g
  modified_base (66)..(66): a, c, t or g
  modified_base (929)..(929): a, c, t or g
  modified_base (935)..(935): a, c, t or g
  modified_base (965)..(965): a, c, t or g
  modified_base (980)..(980): a, c, t or g
  modified_base (988)..(988): a, c, t or g
  modified_base (998)..(998): a, c, t or g
  modified_base (1006)..(1006): a, c, t or g
  modified_base (1019)..(1021): a, c, t or g
  modified_base (1026)..(1026): a, c, t or g
  modified_base (1035)..(1035): a, c, t or g
  modified_base (1038)..(1038): a, c, t or g
  modified_base (1049)..(1049): a, c, t or g
naatatngactcactatgggaatttggccctcgaggccaagaattcggcacgaggcctgttttganaccagaaggtttcataattggttctacgacccttttgagcctagaattattgttcttatataagatcactgaagaaagaggaacccccacaaccccctccacaaagagaccaggggcgggtgatgagacctggggtttagaaccccaggtgagacctcaaatcactgcattcattctgagcccccttcctgtccccaggggaggtgtattgtgtatgtagccttagagcatctctgcctccaacccagcagttctctgccaaagcttgtggaggagggagagccctgtccctgccctcaggctccccagtgctcctggcccttctatttatttgactgattattgcttctttccttgcattaaaggagatcttcccctaacctttgggccaatttactggccactaatttcgtttaaataccattgtgtcattggggggaccgtctttacccctgctgacctcccacctatccgccctgcagcagaaccttggcggtttataggtaatgatggaacttagactcctcttcccagagtcacaagtagcctctgggatctgccaacacacgtccactcccaagccactagcccactccccagttggcccttctgcccttaccccacacacagtccaactcttccacctctggggaagatggagcaggtctttgggaagctcccacacccacctctgccactcttaacactaagtgagagttggggagaaactgaagccgtgtttttggccccccgaggctaaccctgatccatagtgctacctgcacctctggattctggattcacagaccaagtccaagcccgttcttacgtcgccataaaggcccccgaacggcattctcggnacttcnggttggtttttgaacatttttattaaaaanggactgtaaaaaaanccacttanacccttttancctccttncagtatgccaaannntaaanaaaattggnaanaataggaaaanttttttta

SEQ ID NO: 1007 - DNA, 4540 bp, Homo sapiens
cgctgctgggctgcggcggcggcggcggcggcggtggttactatggcggagtcggccggagcctcctccttcttcccccttgttgtcctcctgctcgccggcagcggcgggtccgggccccggggggtccaggctctgctgtgtgcgtgcaccagctgcctccaggccaactacacgtgtgagacagatggggcctgcatggtttccattttcaatctggatgggatggagcaccatgtgcgcacctgcatccccaaagtggagctggtccctgccgggaagcccttctactgcctgagctcggaggacctgcgcaacacccactgctgctacactgactactgcaacaggatcgacttgagggtgcccagtggtcacctcaaggagcctgagcacccgtccatgtggggcccggtggagctggtaggcatcatcgccggcccggtgttcctcctgttcctcatcatcatcattgttttccttgtcattaactatcatcagcgtgtctatcacaaccgccagagactggacatggaagatccctcatgtgagatgtgtctctccaaagacaagacgctccaggatcttgtctacgatctctccacctcagggtctggctcagggttacccctctttgtccagcgcacagtggcccgaaccatcgttttacaagagattattggcaagggtcggtttggggaagtatggcggggccgctggaggggtggtgatgtggctgtgaaaatattctcttctcgtgaagaacggtcttggttcagggaagcagagatataccagacggtcatgctgcgccatgaaaacatccttggatttattgctgctgacaataaagataatggcacctggacacagctgtggcttgtttctgactatcatgagcacgggtccctgtttgattatctgaaccggtacacagtgacaattgaggggatgattaagctggccttgtctgctgctagtgggctggcacacctgcacatggagatcgtgggcacccaagggaagcctggaattgctcatcgagacttaaagtcaaagaacattctggtgaagaaaaatggcatgtgtgccatagcagacctgggcctggctgtccgtcatgatgcagtcactgacaccattgacattgccccgaatcagagggtggggaccaaacgatacatggcccctgaagtacttgatgaaaccattaatatgaaacactttgactcctttaaatgtgctgatatttatgccctcgggcttgtatattgggagattgctcgaagatgcaattctggaggagtccatgaagaatatcagctgccatattacgacttagtgccctctgacccttccattgaggaaatgcgaaaggttgtatgtgatcagaagctgcgtcccaacatccccaactggtggcagagttatgaggcactgcgggtgatggggaagatgatgcgagagtgttggtatgccaacggcgcagcccgcctgacggccctgcgcatcaagaagaccctctcccagctcagcgtgcaggaagacgtgaagatctaactgctccctctctccacacggagctcctggcagcgagaactacgcacagctgccgcgttgagcgtacgatggaggcctacctctcgtttctgcccagccctctgtggccaggagccctggcccgcaagagggacagagcccgggagagactcgctcactcccatgttgggtttgagacagacaccttttctatttacctcctaatggcatggagactctgagagcgaattgtgtggagaactcagtgccacacctcgaactggttgtagtgggaagtcccgcgaaacccggtgcatctggcacgtggccaggagccatgacaggggcgcttgggaggggccggaggaaccgaggtgttgccagtgctaagctgccctgagggtttccttcggggaccagcccacagcacaccaaggtggcccggaagaaccagaagtgcagcccctctcacaggcagctctgagccgcgctttcccctcctccctgggatggacgctgccgggagactgccagtggagacggaatctgccgctttgtctgtccagccgtgtgtgcatgtgccgaggtgcgtcccccgttgtgcctggttcgtgccatgcccttacacgtgcgtgtgagtgtgtgtgtgtgtctgtaggtgcgcacttacctgcttgagctttctgtgcatgtgcaggtcgggggtgtggtcgtcatgctgtccgtgcttgctggtgcctcttttcagtagtgagcagcatctagtttccctggtgcccttccctggaggtctctccctcccccagagcccctcatgccacagtggtactctgtgtctggcaggctactctgcccaccccagcatcagcacagctctcctcctccatctcagactgtggaaccaaagctggcccagttgtccatgacaaaagaggcttttgggccaaaatgtgagggtggtgggtgggatgggcagggaaggaatcctggtggaagtcttgggtgttagtgtcagccgtgggaaatgagccagcccaagggcatcatcctcagcagcatcgaggaagggccgaggaatgtgaagccagatctcgggactcagattggaatgttacatctgtctttcatctcccagatcctggaaacagcagtgtatatttttggtggtggtgggtttggggtggggaagggaagggcgggcaaggagtggggagggagtctggggtgggagggaggcatctgcatgggtcttcttttactggactgtctgatcagggtggagggaaggtgagaggtttgcatccacttcaggagccctactgaagggaacagcctgagccgaacatgttatttaacctgagtatagtatttaacgaagcctagaagcacggctgtgggtggtgatttggtcagcatatcttaggtatataataactttgaagccataacttttaactggagtggtttgatttctttttttaattttattgggagggtttggattttaactttttttaatgttgttaaatattaagtttttgtaaaaggaaaaccatctctgtgattacctctcaatctatttgtttttaaagaaatccctaaaaaaaaaaattatccaattgaacgcacatagctcaatcacactggaaatgtttgtcgttgcacctgagcctgttcccactcagcagtgagagttcctctttgccctgaggctcagtctctctcgtattttgtccccacccccaattccttgagtggtttttgctctagggccctttcttgcactgtccagctggttgtaccctctccaggcatttattcaacaaatgtgggtgaagtgcctgctgggtgccaggtgctgggaatacatctgtggacaagacatgcttgggtcctactcctggagcactgtaaaaagagctgattcaagtaagtagatgcctgttttgagaccagaaggtttcataattggttctacgacccttttgagcctagaattattgttcttatataagatcactgaagaaagaggaacccccacaaccccctccacaaagagaccaggggcgggtgatgagacctggggtttagaaccccaggtgagacctcaaatcactgcattcattctgagcccccttcctgtccccaggggaggtgtattgtgtatgtagccttagagcatctctgcctccaacccagcagttctctgccaaagcttgtggaggagggagagccctgtccctgccctcaggctccccagtgctcctggcccttctatttatttgactgattattgcttctttccttgcattaaaggagatcttcccctaacctttgggccaatttactggccactaatttcgtttaaataccattgtgtcattggggggaccgtctttacccctgctgacctcccacctatccgccctgcagcagaaccttggcggtttataggtaatgatggaacttagactcctcttcccagagtcacaagtagcctctgggatctgccaacacacgtccactcccaagccactagcccactccccagttggcccttctgcccttaccccacacacagtccaactcttccacctctggggaagatggagcaggtctttgggaagctcccacacccacctctgccactcttaacactaagtgagagttggggagaaactgaagccgtgtttttggccccccgaggctaaccctgatccatagtgctacctgcacctctggattctggattcacagaccaagtccaagcccgttcttacgtcgccataaaggcccccgaacggcattctcggtacttctgtttgtttttgtacattttattagaaaggactgtaaaatagccacttagacactttacctcttcagtatgcaaatgtaaataaattgtaatataggaaatcttttgttttaatataagaatgagcctgtccaatttctgctgtacattattaaaagttttattcacaaaaaaaaaaaaaaa

SEQ ID NO: 1008 - DNA, 1051 bp, Homo sapiens
  modified_base (5)..(5): a, c, t or g
  modified_base (15)..(15): a, c, t or g
  modified_base (783)..(783): a, c, t or g
  modified_base (794)..(794): a, c, t or g
  modified_base (823)..(823): a, c, t or g
  modified_base (829)..(829): a, c, t or g
  modified_base (836)..(836): a, c, t or g
  modified_base (843)..(843): a, c, t or g
  modified_base (846)..(846): a, c, t or g
  modified_base (856)..(856): a, c, t or g
  modified_base (867)..(867): a, c, t or g
  modified_base (893)..(893): a, c, t or g
  modified_base (896)..(897): a, c, t or g
  modified_base (907)..(907): a, c, t or g
  modified_base (911)..(941): a, c, t or g
  modified_base (943)..(947): a, c, t or g
  modified_base (951)..(953): a, c, t or g
  modified_base (957)..(957): a, c, t or g
  modified_base (959)..(960): a, c, t or g
  modified_base (962)..(962): a, c, t or g
  modified_base (967)..(967): a, c, t or g
  modified_base (974)..(981): a, c, t or g
  modified_base (985)..(985): a, c, t or g
  modified_base (989)..(990): a, c, t or g
  modified_base (993)..(993): a, c, t or g
  modified_base (1005)..(1007): a, c, t or g
  modified_base (1009)..(1011): a, c, t or g
  modified_base (1017)..(1017): a, c, t or g
  modified_base (1020)..(1027): a, c, t or g
  modified_base (1029)..(1035): a, c, t or g
  modified_base (1037)..(1040): a, c, t or g
  modified_base (1044)..(1046): a, c, t or g
  modified_base (1050)..(1050): a, c, t or g
attancgactactangggaatttggccctcgaggccaagaattcggcacgagggcggggagccggggcagacgtccgtagcgccccctcccgaggaggtcgagccgggcagtggggtccgcatcgtggtggagtactgtgaaccctgcggcttcgaggcgacctacctggagctggccagtgctgtgaaggagcagtatccgggcatcgagatcgagtcgcgcctcgggggcacaggtgcctttgagatagagataaatggacagctggtgttctccaagctggagaatgggggctttccctatgagaaagatctcattgaggccatccgaagagccagtaatggagaaaccctagaaaagatcaccaacagccgtcctccctgcgtcatcctgtgactgcacaggactctgggttcctgctctgttctggggtccaaaccttggtctccctttggtcctgctgggagctccccctgcctctttcccctacttagctccttagcaaagagaccctggcctccactttgccctttgggtacaaagaaggaatagaagattccgtggccttgggggcaggagagagacactctccatgaacacttctccagccacctcatacccccttcccagggtaagtgcccacgaaagcccagtccactcttcgcctcggtaatacctgtctgatgccacagattttatttattctcccctaacccagggcaatgtcagctattggcagtaaagtggcgctacaaacactaaaaaaaaaaaaaaaaatttcntgggggccccnaaagtttattcctttttagggagggttanttttanttttggncactggnccntcttttttanaacgtcgggantgggaaaaaccctggggttacccaantanntcccccttgnaaannnnnnnnnnnnnnnnnnnnnnnnnnnnnnnannnnnaaannntttnanntntttcnaattttnnnnnnnntccntttnnggnaatttggccccnnngnnnaaaaanttnnnnnnnngnnnnnnnannnngggnnnaaant

SEQ ID NO: 1009 - DNA, 781 bp, Homo sapiens
gtcacacccggaagcaggggcccgagcggagccggccgcgatgagcggggagccggggcagacgtccgtagcgccccctcccgaggaggtcgagccgggcagtggggtccgcatcgtggtggagtactgtgaaccctgcggcttcgaggcgacctacctggagctggccagtgctgtgaaggagcagtatccgggcatcgagatcgagtcgcgcctcgggggcacaggtgcctttgagatagagataaatggacagctggtgttctccaagctggagaatgggggctttccctatgagaaagatctcattgaggccatccgaagagccagtaatggagaaaccctagaaaagatcaccaacagccgtcctccctgcgtcatcctgtgactgcacaggactctgggttcctgctctgttctggggtccaaaccttggtctccctttggtcctgctgggagctccccctgcctctttcccctacttagctccttagcaaagagaccctggcctccactttgccctttgggtacaaagaaggaatagaagattccgtggccttgggggcaggagagagacactctccatgaacacttctccagccacctcatacccccttcccagggtaagtgcccacgaaagcccagtccactcttcgcctcggtaatacctgtctgatgccacagattttatttattctcccctaacccagggcaatgtcagctattggcagtaaagtggcgctacaaacactaaaaaaaaaaaaaaaaaaaaaaaaaaaaa

SEQ ID NO: 1010 - DNA, 1109 bp, Homo sapiens
  modified_base (2)..(2): a, c, t or g
  modified_base (6)..(6): a, c, t or g
  modified_base (8)..(8): a, c, t or g
  modified_base (69)..(69): a, c, t or g
  modified_base (533)..(535): a, c, t or g
  modified_base (537)..(537): a, c, t or g
  modified_base (539)..(540): a, c, t or g
  modified_base (546)..(546): a, c, t or g
  modified_base (548)..(550): a, c, t or g
  modified_base (552)..(553): a, c, t or g
  modified_base (558)..(558): a, c, t or g
  modified_base (564)..(564): a, c, t or g
  modified_base (571)..(571): a, c, t or g
  modified_base (573)..(573): a, c, t or g
  modified_base (579)..(579): a, c, t or g
  modified_base (583)..(583): a, c, t or g
  modified_base (593)..(594): a, c, t or g
  modified_base (601)..(601): a, c, t or g
  modified_base (607)..(607): a, c, t or g
  modified_base (612)..(612): a, c, t or g
  modified_base (618)..(620): a, c, t or g
  modified_base (632)..(632): a, c, t or g
  modified_base (634)..(634): a, c, t or g
  modified_base (641)..(641): a, c, t or g
  modified_base (643)..(643): a, c, t or g
  modified_base (648)..(648): a, c, t or g
  modified_base (652)..(652): a, c, t or g
  modified_base (654)..(654): a, c, t or g
  modified_base (657)..(657): a, c, t or g
  modified_base (663)..(663): a, c, t or g
  modified_base (671)..(671): a, c, t or g
  modified_base (673)..(673): a, c, t or g
  modified_base (675)..(675): a, c, t or g
  modified_base (677)..(677): a, c, t or g
  modified_base (679)..(680): a, c, t or g
  modified_base (683)..(683): a, c, t or g
  modified_base (687)..(687): a, c, t or g
  modified_base (692)..(693): a, c, t or g
  modified_base (698)..(698): a, c, t or g
  modified_base (722)..(722): a, c, t or g
  modified_base (724)..(724): a, c, t or g
  modified_base (727)..(729): a, c, t or g
  modified_base (736)..(736): a, c, t or g
  modified_base (744)..(745): a, c, t or g
  modified_base (747)..(749): a, c, t or g
  modified_base (755)..(755): a, c, t or g
  modified_base (757)..(758): a, c, t or g
  modified_base (761)..(761): a, c, t or g
  modified_base (766)..(767): a, c, t or g
  modified_base (769)..(769): a, c, t or g
  modified_base (772)..(772): a, c, t or g
  modified_base (779)..(779): a, c, t or g
  modified_base (784)..(784): a, c, t or g
  modified_base (797)..(797): a, c, t or g
  modified_base (801)..(801): a, c, t or g
  modified_base (806)..(807): a, c, t or g
  modified_base (811)..(811): a, c, t or g
  modified_base (813)..(813): a, c, t or g
  modified_base (816)..(816): a, c, t or g
  modified_base (818)..(818): a, c, t or g
  modified_base (820)..(820): a, c, t or g
  modified_base (825)..(826): a, c, t or g
  modified_base (869)..(869): a, c, t or g
  modified_base (876)..(876): a, c, t or g
  modified_base (879)..(879): a, c, t or g
  modified_base (886)..(886): a, c, t or g
  modified_base (904)..(904): a, c, t or g
  modified_base (906)..(906): a, c, t or g
  modified_base (909)..(911): a, c, t or g
  modified_base (913)..(913): a, c, t or g
  modified_base (915)..(915): a, c, t or g
  modified_base (918)..(918): a, c, t or g
  modified_base (920)..(920): a, c, t or g
  modified_base (926)..(926): a, c, t or g
  modified_base (932)..(932): a, c, t or g
  modified_base (948)..(949): a, c, t or g
  modified_base (954)..(955): a, c, t or g
  modified_base (957)..(957): a, c, t or g
  modified_base (961)..(961): a, c, t or g
  modified_base (973)..(973): a, c, t or g
  modified_base (975)..(975): a, c, t or g
  modified_base (977)..(978): a, c, t or g
  modified_base (984)..(984): a, c, t or g
  modified_base (990)..(990): a, c, t or g
  modified_base (992)..(992): a, c, t or g
  modified_base (995)..(995): a, c, t or g
  modified_base (999)..(1002): a, c, t or g
  modified_base (1005)..(1009): a, c, t or g
  modified_base (1016)..(1016): a, c, t or g
  modified_base (1019)..(1019): a, c, t or g
  modified_base (1022)..(1022): a, c, t or g
  modified_base (1024)..(1024): a, c, t or g
  modified_base (1031)..(1032): a, c, t or g
  modified_base (1035)..(1035): a, c, t or g
  modified_base (1046)..(1046): a, c, t or g
  modified_base (1048)..(1049): a, c, t or g
  modified_base (1051)..(1052): a, c, t or g
  modified_base (1057)..(1057): a, c, t or g
  modified_base (1063)..(1063): a, c, t or g
  modified_base (1067)..(1068): a, c, t or g
  modified_base (1087)..(1088): a, c, t or g
  modified_base (1092)..(1094): a, c, t or g
  modified_base (1099)..(1100): a, c, t or g
  modified_base (1102)..(1103): a, c, t or g
  modified_base (1105)..(1105): a, c, t or g
  modified_base (1109)..(1109): a, c, t or g
cngccngnaattacccctcactaaagggaacaaaagctgggagctccaccgcgggtggcggccgctctngaactaggtggatcccccgggctgcaggaattcggcacgaggtacagtggaaggtggataacgccctccaatcgggtaactcccaggagagtgtcacagagcaggacagcaaggacagcacctacagcctcagcagcaccctgacgctgagcaaagcagactacgagaaacacaaagtctacgcctgcgaagtcacccatcagggcctgagctcgcccgtcacaaagagcttcaacaggggagagtgttagagggagaagtgcccccacctgctcctcagttccagcctgaccccctcccatcctttggcctctgaccctttttccacaggggacctacccctattgcggtcctccagctcatctttcacctcacccccctcctcctccttggctttaattatgctaatgttggaggagaatgaataaataaagtgaatctttgcaaaaaaaaaaaaaaaaaannncncnnccaaantnnnannagggnaaaatncttcttngnaaaaanaaangaggcggggnngggcccnaaaaanaattnaaatannntgggccacccgnanaaaaaananaaaanattngnccncctttnggaaaagnanangntnnccntttnaatannaaatntaatttacggggagcccccaaggntnaannntcttttnggggaagnngnnnaaattngnntantttanngnaanggtgggntttcnaaagggggtttcnctgntgganntttncngantntnaaaanncctaaatggttgggaaaaaaattttttcccccttttttaaaanaaggggnaanttttttnggggtttttttttttttnangcnnngnanctngnttttanaaaaanatttttggggaaaaannttttnntngggnccccccgggttntnanngctccncaaaananccnattnnnnggnnnnnaaaaaanttngtngnggggggnngancaaaaaatttntnngnngaaantttggngtgnnaaaaaaaaaaaaaaaaacnngggnnnttttnnanngntttn

SEQ ID NO: 1011 - DNA, 1084 bp, Homo sapiens
  modified_base (3)..(3): a, c, t or g
  modified_base (6)..(6): a, c, t or g
  modified_base (69)..(70): a, c, t or g
  modified_base (606)..(606): a, c, t or g
  modified_base (685)..(685): a, c, t or g
  modified_base (692)..(692): a, c, t or g
  modified_base (697)..(697): a, c, t or g
  modified_base (703)..(703): a, c, t or g
  modified_base (707)..(707): a, c, t or g
  modified_base (736)..(736): a, c, t or g
  modified_base (739)..(739): a, c, t or g
  modified_base (744)..(744): a, c, t or g
  modified_base (754)..(754): a, c, t or g
  modified_base (764)..(764): a, c, t or g
  modified_base (766)..(769): a, c, t or g
  modified_base (804)..(804): a, c, t or g
  modified_base (816)..(846): a, c, t or g
  modified_base (848)..(852): a, c, t or g
  modified_base (856)..(856): a, c, t or g
  modified_base (859)..(860): a, c, t or g
  modified_base (863)..(866): a, c, t or g
  modified_base (872)..(875): a, c, t or g
  modified_base (883)..(888): a, c, t or g
  modified_base (893)..(893): a, c, t or g
  modified_base (897)..(902): a, c, t or g
  modified_base (904)..(905): a, c, t or g
  modified_base (911)..(911): a, c, t or g
  modified_base (915)..(916): a, c, t or g
  modified_base (923)..(923): a, c, t or g
  modified_base (929)..(929): a, c, t or g
  modified_base (933)..(933): a, c, t or g
  modified_base (935)..(935): a, c, t or g
  modified_base (947)..(954): a, c, t or g
  modified_base (957)..(961): a, c, t or g
  modified_base (969)..(969): a, c, t or g
  modified_base (971)..(975): a, c, t or g
  modified_base (980)..(989): a, c, t or g
  modified_base (992)..(994): a, c, t or g
  modified_base (1000)..(1000): a, c, t or g
  modified_base (1005)..(1005): a, c, t or g
  modified_base (1008)..(1008): a, c, t or g
  modified_base (1013)..(1016): a, c, t or g
  modified_base (1025)..(1026): a, c, t or g
  modified_base (1034)..(1036): a, c, t or g
  modified_base (1041)..(1041): a, c, t or g
  modified_base (1045)..(1048): a, c, t or g
  modified_base (1055)..(1055): a, c, t or g
  modified_base (1057)..(1057): a, c, t or g
  modified_base (1063)..(1076): a, c, t or g
  modified_base (1078)..(1080): a, c, t or g
  modified_base (1082)..(1083): a, c, t or g
tantancgactactatagggaatttggccctcgaggccaagaattcggcacgagggccatgattgcacnnaccgactcggctgaggctgccccaggaaccataaggggtgacttcagcgtccacatcagcaggaatgtcatccacgccagcgactccgtggagggggcccagcgggagatccagctgtggttccagagcagtgagctggtgagctgggcagatgggggccagcacagcagcatccacccagcctgaggctcaagctgcccttaccaccccatcccccacgcaggaccaactacctccgtcagcaagaacccaagcccacatccaaacctgcctgtcccaaaccacttacttccctgttcacctctgccccaccccagcccagaggagtttgagccaccaacttcagtgcctttctgtaccccaagccagcacaagattggaccaatcctttttgcaccaaagtgccggacaacctttgtggtgggggggggtcttcacattatcataacctctcctctaaaggggaggcattaaaattcactgtgcccagcacatgggtggtacactaattatgacttcccccagctctgaggtanaaatgacgcctttatgcaagttgtaaggagttgaacagtaaagaggaagttttgcacaaaaaaaaaaaaaaaaaaaaanttttttnttaangggccngaangttttttcctttaaggggggtttattttnagnttggncctgggccgntttttaaaancnnnnggatgggaaaaccctggggtttcccaaattaattnccctttgaaaannnnnnnnnnnnnnnnnnnnnnnnnnnnnnntnnnnnaaantgnnaannnntttttnnnntttttttnnnnnnttttnaaannnnnntnntttttngggnnatttttncccctngggncnaaaaaatttttnnnnnnnnggnnnnntttttttngnnnnnccccnnnnnnnnnntgnnnaggttnccccnggnaaaannnnagggggggnnaattttcnnnccccntttnnnnggggaantntttttnnnnnnnnnnnnnntnnntnng

SEQ ID NO: 1012 - DNA, 1059 bp, Homo sapiens
cgcgctcacagcggcccgcgggccgggcgtcatgggcggcctcttctggcgctccgcgctgcgggggctgcgctgcggcccgcgggccccgggcccgagcctgctagtgcgccacggctcgggagggccctcctggacccgggagcggaccctggtggcggtgaagcccgatggcgtgcaacggcggctcgttggggacgtgatccagcgctttgagaggcggggcttcacgctggtggggatgaagatgctgcaggcaccagagagcgtccttgccgagcactaccaggacctgcggaggaagcccttctaccctgccctcatccgctacatgagctctgggcctgtggtggccatggtctgggaagggtacaatgtcgtccgcgcctcgagggccatgattggacacaccgactcggctgaggctgccccaggaaccataaggggtgacttcagcgtccacatcagcaggaatgtcatccacgccagcgactccgtggagggggcccagcgggagatccagctgtggttccagagcagtgagctggtgagctgggcagacgggggccagcacagcagcatccacccagcctgaggctcaagctgcccttaccaccccatcccccacgcaggaccaactacctccgtcagcaagaacccaagcccacatccaaacctgcctgtcccaaaccacttacttccctgttcacctctgccccaccccagcccagaggagtttgagccaccaacttcagtgcctttctgtaccccaagccagcacaagattggaccaatcctttttgcaccaaagtgccggacaacctttgtggtgggggggggtcttcacattatcataacctctcctctaaaggggaggcattaaaattcactgtgcccagcacatgggtggtacactaattatgacttcccccagctctgaggtagaaatgacgcctttatgcaagttgtaaggagttgaacagtaaagaggaagttttgcacacccaaaaaaaaaaaaaaaaaaaaaaaaaaaaaaaaaaaaaaaaaaaaaaaaaaaaa

SEQ ID NO: 1013 - DNA, 1011 bp, Homo sapiens
  modified_base (1)..(1): a, c, t or g
  modified_base (5)..(5): a, c, t or g
  modified_base (395)..(395): a, c, t or g
  modified_base (404)..(404): a, c, t or g
  modified_base (414)..(414): a, c, t or g
  modified_base (416)..(416): a, c, t or g
  modified_base (419)..(419): a, c, t or g
  modified_base (433)..(433): a, c, t or g
  modified_base (435)..(435): a, c, t or g
  modified_base (444)..(444): a, c, t or g
  modified_base (447)..(447): a, c, t or g
  modified_base (458)..(458): a, c, t or g
  modified_base (474)..(474): a, c, t or g
  modified_base (480)..(480): a, c, t or g
  modified_base (514)..(514): a, c, t or g
  modified_base (521)..(521): a, c, t or g
  modified_base (526)..(526): a, c, t or g
  modified_base (531)..(531): a, c, t or g
  modified_base (539)..(539): a, c, t or g
  modified_base (544)..(544): a, c, t or g
  modified_base (546)..(546): a, c, t or g
  modified_base (563)..(563): a, c, t or g
  modified_base (593)..(593): a, c, t or g
  modified_base (611)..(611): a, c, t or g
  modified_base (623)..(623): a, c, t or g
  modified_base (633)..(633): a, c, t or g
  modified_base (635)..(635): a, c, t or g
  modified_base (637)..(637): a, c, t or g
  modified_base (646)..(646): a, c, t or g
  modified_base (654)..(654): a, c, t or g
  modified_base (660)..(660): a, c, t or g
  modified_base (670)..(670): a, c, t or g
  modified_base (684)..(684): a, c, t or g
  modified_base (692)..(692): a, c, t or g
  modified_base (695)..(695): a, c, t or g
  modified_base (720)..(720): a, c, t or g
  modified_base (735)..(735): a, c, t or g
  modified_base (768)..(768): a, c, t or g
  modified_base (770)..(770): a, c, t or g
  modified_base (778)..(778): a, c, t or g
  modified_base (786)..(786): a, c, t or g
  modified_base (792)..(792): a, c, t or g
  modified_base (828)..(828): a, c, t or g
  modified_base (841)..(841): a, c, t or g
  modified_base (850)..(850): a, c, t or g
  modified_base (856)..(856): a, c, t or g
  modified_base (869)..(869): a, c, t or g
  modified_base (873)..(873): a, c, t or g
  modified_base (875)..(875): a, c, t or g
  modified_base (895)..(895): a, c, t or g
  modified_base (903)..(903): a, c, t or g
  modified_base (915)..(916): a, c, t or g
  modified_base (945)..(946): a, c, t or g
  modified_base (950)..(950): a, c, t or g
  modified_base (961)..(961): a, c, t or g
  modified_base (963)..(963): a, c, t or g
  modified_base (966)..(966): a, c, t or g
  modified_base (969)..(970): a, c, t or g
  modified_base (976)..(977): a, c, t or g
  modified_base (988)..(988): a, c, t or g
  modified_base (990)..(990): a, c, t or g
  modified_base (1001)..(1001): a, c, t or g
  modified_base (1011)..(1011): a, c, t or g
ngccngaaattaccctcactaaagggaacaaaagctgggagctccaccgcgggtggcggccgctctagaactaggtggatcccccgggctgcaggaattcggcacgaggtaattatgaaaaagaaggtctcggtgcttccagccacataaccacaaaatcaatggctgctcctccaagctgtggtctgagcccactgctggtcctggtggtaaccgctctgtccaccctattatctttaacagaaacatcatagctgcattaaaaaaatacaatatggacatgtaaaaagacaaaaaccaagttatctgtttcctgttctcttgtatagctgaaattccagtttaggagctcagttgagaaacagttccattcaactggaacatttttttttttnccttttaanaaagcttctngnganccttcggggcttcngngaaaaaccngangcagggctccntccaaactcaaaaggntttggnatatgctgtattttaaagggacagtttgtaactngggctgnaaagnaaacnggggctgngtttncnatgatgatgatcatcangatcatgatgattttaacagttttacttcnggcctttcctagctaganaaggagttaatntttctaaggnancncccatatcncctttaangacatngatttctaangatataaatttcancctacatngangccaagcttttttgccacaaagaanattcttaccaagagngggctttgggaaaacagctggaactgatgttcncntttatatntgtactancatttnccacgctgatgtttatgtactgaaaacagttctgcnctcttgtacaaanaaaaaaacncctggncccatccaaaaanagtntnctgtctttttcgccaaaaanaaaaaagnggggaaaagagnnggcccaatttcaaaacccctcaatccccnngaancaaaccccttntnccnaanncctaannccctttacccngnagggggaaaancccccctttn

SEQ ID NO: 1014 - DNA, 2542 bp, Homo sapiens
ggccagaagaaatctggcctcggaacacgccattctccgcgccgcttccaataaccactaacatccctaacgagcatccgagccgagggctctgctcggaaatcgtcctggcccaactcggcccttcgagctctcgaagattaccgcatctattttttttttcttttttttcttttcctagcgcagataaagtgagcccggaaagggaaggagggggcggggacaccattgccctgaaagaataaataagtaaataaacaaactggctcctcgccgcagctggacgcggtcggttgagtccaggttgggtcggacctgaacccctaaaagcggaaccgcctcccgccctcgccatcccggagctgagtcgccggcggcggtggctgctgccagacccggagtttcctctttcactggatggagctgaactttgggcggccagagcagcacagctgtccggggatcgctgcatgctgagctccctcggcaagacccagcggcggctcgggatttttttgggggggcggggaccagccccgcgccggcaccatgttcctggcgaccctgtacttcgcgctgccgctcttggacttgctcctgtcggccgaagtgagcggcggagaccgcctggattgcgtgaaagccagtgatcagtgcctgaaggagcagagctgcagcaccaagtaccgcacgctaaggcagtgcgtggcgggcaaggagaccaacttcagcctggcatccggcctggaggccaaggatgagtgccgcagcgccatggaggccctgaagcagaagtcgctctacaactgccgctgcaagcggggtatgaagaaggagaagaactgcctgcgcatttactggagcatgtaccagagcctgcagggaaatgatctgctggaggattccccatatgaaccagttaacagcagattgtcagatatattccgggtggtcccattcatatcagatgtttttcagcaagtggagcacattcccaaagggaacaactgcctggatgcagcgaaggcctgcaacctcgacgacatttgcaagaagtacaggtcggcgtacatcaccccgtgcaccaccagcgtgtccaatgatgtctgcaaccgccgcaagtgccacaaggccctccggcagttctttgacaaggtcccggccaagcacagctacggaatgctcttctgctcctgccgggacatcgcctgcacagagcggaggcgacagaccatcgtgcctgtgtgctcctatgaagagagggagaagcccaactgtttgaatttgcaggactcctgcaagacgaattacatctgcagatctcgccttgcggatttttttaccaactgccagccagagtcaaggtctgtcagcagctgtctaaaggaaaactacgctgactgcctcctcgcctactcggggcttattggcacagtcatgacccccaactacatagactccagtagcctcagtgtggccccatggtgtgactgcagcaacagtgggaacgacctagaagagtgcttgaaatttttgaatttcttcaaggacaatacatgtcttaaaaatgcaattcaagcctttggcaatggctccgatgtgaccgtgtggcagccagccttcccagtacagaccaccactgccactaccaccactgccctccgggttaagaacaagcccctggggccagcagggtctgagaatgaaattcccactcatgttttgccaccgtgtgcaaatttacaggcacagaagctgaaatccaatgtgtcgggcaatacacacctctgtatttccaatggtaattatgaaaaagaaggtctcggtgcttccagccacataaccacaaaatcaatggctgctcctccaagctgtggtctgagcccactgctggtcctggtggtaaccgctctgtccaccctattatctttaacagaaacatcatagctgcattaaaaaaatacaatatggacatgtaaaaagacaaaaaccaagttatctgtttcctgttctcttgtatagctgaaattccagtttaggagctcagttgagaaacagttccattcaactggaacattttttttttttccttttaagaaagcttcttgtgatccttcggggcttctgtgaaaaacctgatgcagtgctccatccaaactcagaaggctttgggatatgctgtattttaaagggacagtttgtaacttgggctgtaaagcaaactggggctgtgttttcgatgatgatgatgatcatgatgatgatgattttaacagttttacttctggcctttcctagctagagaaggagttaatatttctaaggtaactcccatatctcctttaatgacattgatttctaatgatataaatttcagcctacattgatgccaagcttttttgccacaaagaagattcttaccaagagtgggctttgtggaaacagctggtactgatgttcacctttatatatgtactagcattttccacgctgatgtttatgtactgtaaacagttctgcactcttgtacaaaagaaaaaac

SEQ ID NO: 1015 - DNA, 1028 bp, Homo sapiens
  modified_base (16)..(16): a, c, t or g
  modified_base (600)..(600): a, c, t or g
  modified_base (610)..(610): a, c, t or g
  modified_base (613)..(613): a, c, t or g
  modified_base (617)..(617): a, c, t or g
  modified_base (619)..(619): a, c, t or g
  modified_base (628)..(628): a, c, t or g
  modified_base (634)..(634): a, c, t or g
  modified_base (640)..(640): a, c, t or g
  modified_base (651)..(652): a, c, t or g
  modified_base (655)..(655): a, c, t or g
  modified_base (660)..(660): a, c, t or g
  modified_base (666)..(666): a, c, t or g
  modified_base (673)..(674): a, c, t or g
  modified_base (680)..(680): a, c, t or g
  modified_base (688)..(689): a, c, t or g
  modified_base (693)..(693): a, c, t or g
  modified_base (699)..(699): a, c, t or g
  modified_base (709)..(709): a, c, t or g
  modified_base (720)..(753): a, c, t or g
  modified_base (757)..(761): a, c, t or g
  modified_base (764)..(768): a, c, t or g
  modified_base (773)..(777): a, c, t or g
  modified_base (780)..(781): a, c, t or g
  modified_base (785)..(793): a, c, t or g
  modified_base (795)..(799): a, c, t or g
  modified_base (803)..(805): a, c, t or g
  modified_base (808)..(812): a, c, t or g
  modified_base (816)..(817): a, c, t or g
  modified_base (820)..(821): a, c, t or g
  modified_base (829)..(832): a, c, t or g
  modified_base (836)..(839): a, c, t or g
  modified_base (842)..(842): a, c, t or g
  modified_base (846)..(852): a, c, t or g
  modified_base (854)..(861): a, c, t or g
  modified_base (867)..(868): a, c, t or g
  modified_base (871)..(871): a, c, t or g
  modified_base (873)..(876): a, c, t or g
  modified_base (879)..(881): a, c, t or g
  modified_base (887)..(892): a, c, t or g
  modified_base (895)..(900): a, c, t or g
  modified_base (907)..(918): a, c, t or g
  modified_base (921)..(921): a, c, t or g
  modified_base (923)..(927): a, c, t or g
  modified_base (930)..(930): a, c, t or g
  modified_base (932)..(942): a, c, t or g
  modified_base (945)..(949): a, c, t or g
  modified_base (954)..(961): a, c, t or g
  modified_base (963)..(963): a, c, t or g
  modified_base (974)..(978): a, c, t or g
  modified_base (980)..(980): a, c, t or g
  modified_base (985)..(993): a, c, t or g
  modified_base (997)..(1014): a, c, t or g
  modified_base (1016)..(1020): a, c, t or g
  modified_base (1023)..(1023): a, c, t or g
  modified_base (1028)..(1028): a, c, t or g
cagctgaaattacccntcactaaagggaacaaaagctggagctccaccgcgggtggcggccgctctagaactagtggatcccccgggctgcaggaattcggcacgaggctgaccgtcctaagtcagcccaaggctgccccctcggtcactctgttcccgccctcctctgaggagcttcaagccaacaaggccacactggtgtgtctcataagtgacttctacccgggagccgtgacagtggcctggaaggcagatagcagccccgtcaaggcgggagtggagaccaccacaccctccaaacaaagcaacaacaagtacgcggccagcagctatctgagcctgacgcctgagcagtggaagtcccacagaagctacagctgccaggtcacgcatgaagggagcaccgtggagaagacagtggcccctacagaatgttcataggttctaaaccctcaccccccccacgggagactagagctgcaggatcccaggggaggggtctctcctcccaccccaaggcatcaagcccttctccctgcactcaataaaccctcaataaatattctcattgtcaatcagaaaaaaaaaaaaaaaattcgngggggggccnggnaccnanttccccctntagggngtcgtnttacatttcannggncgtcnttttanaacgtcnngactgnaaaaaccnngggnttaccnaatttattcncctttgaaaannnnnnnnnnnnnnnnnnnnnnnnnnnnnnnnnnaaannnnnaannnnnttttnnnnnttnntttnnnnnnnnntnnnnntttnnnccnnnnntaannggnnaaaaaaannnntggnnnnttncccnnnnnnngnnnnnnnntttttnnaantnnnnggnnntccccnnnnnnttnnnnnnaattttnnnnnnnnnnnnttnannnnnttnannnnnnnnnnnggnnnnnccccnnnnnnnntnttttttttccnnnnntnttttnnnnnnnnntttnnnnnnnnnnnnnnnnnntnnnnnttnttttn

SEQ ID NO: 1016 - DNA, 1051 bp, Homo sapiens
  modified_base (2)..(2): a, c, t or g
  modified_base (581)..(581): a, c, t or g
  modified_base (585)..(585): a, c, t or g
  modified_base (592)..(592): a, c, t or g
  modified_base (598)..(599): a, c, t or g
  modified_base (604)..(604): a, c, t or g
  modified_base (619)..(619): a, c, t or g
  modified_base (621)..(621): a, c, t or g
  modified_base (623)..(623): a, c, t or g
  modified_base (625)..(625): a, c, t or g
  modified_base (629)..(629): a, c, t or g
  modified_base (631)..(631): a, c, t or g
  modified_base (636)..(637): a, c, t or g
  modified_base (656)..(656): a, c, t or g
  modified_base (658)..(659): a, c, t or g
  modified_base (662)..(663): a, c, t or g
  modified_base (670)..(670): a, c, t or g
  modified_base (673)..(674): a, c, t or g
  modified_base (677)..(678): a, c, t or g
  modified_base (681)..(681): a, c, t or g
  modified_base (687)..(687): a, c, t or g
  modified_base (692)..(692): a, c, t or g
  modified_base (701)..(701): a, c, t or g
  modified_base (705)..(738): a, c, t or g
  modified_base (741)..(752): a, c, t or g
  modified_base (755)..(762): a, c, t or g
  modified_base (765)..(768): a, c, t or g
  modified_base (770)..(773): a, c, t or g
  modified_base (775)..(776): a, c, t or g
  modified_base (779)..(779): a, c, t or g
  modified_base (782)..(784): a, c, t or g
  modified_base (786)..(795): a, c, t or g
  modified_base (798)..(808): a, c, t or g
  modified_base (810)..(814): a, c, t or g
  modified_base (817)..(817): a, c, t or g
  modified_base (819)..(834): a, c, t or g
  modified_base (837)..(846): a, c, t or g
  modified_base (848)..(850): a, c, t or g
  modified_base (855)..(855): a, c, t or g
  modified_base (858)..(859): a, c, t or g
  modified_base (861)..(865): a, c, t or g
  modified_base (867)..(867): a, c, t or g
  modified_base (870)..(879): a, c, t or g
  modified_base (882)..(887): a, c, t or g
  modified_base (889)..(891): a, c, t or g
  modified_base (893)..(894): a, c, t or g
  modified_base (896)..(896): a, c, t or g
  modified_base (898)..(898): a, c, t or g
  modified_base (900)..(903): a, c, t or g
  modified_base (905)..(908): a, c, t or g
  modified_base (910)..(920): a, c, t or g
  modified_base (922)..(923): a, c, t or g
  modified_base (926)..(930): a, c, t or g
  modified_base (932)..(934): a, c, t or g
  modified_base (937)..(938): a, c, t or g
  modified_base (940)..(940): a, c, t or g
  modified_base (943)..(945): a, c, t or g
  modified_base (950)..(951): a, c, t or g
  modified_base (953)..(960): a, c, t or g
  modified_base (963)..(963): a, c, t or g
  modified_base (965)..(972): a, c, t or g
  modified_base (980)..(980): a, c, t or g
  modified_base (982)..(984): a, c, t or g
  modified_base (986)..(989): a, c, t or g
  modified_base (991)..(993): a, c, t or g
  modified_base (998)..(1002): a, c, t or g
  modified_base (1004)..(1010): a, c, t or g
  modified_base (1013)..(1022): a, c, t or g
  modified_base (1024)..(1049): a, c, t or g
  modified_base (1051)..(1051): a, c, t or g
antaccctcactaaagggaacaaaagctggagctccaccgcggtggcggccgctctagaactagtggatcccccgggctgcaggaattcggcacgaggaacagagtggaagacatatgccatgcagctacacctaccggccctgggacgccggaggacagggcattgtcctcagtcagatacaacagcatttggggccatggtacctgcacacctaaaacactaggccacgcatctgatctgtagtcacatgactaagccaagaggaaggagcaagactcaagacatgattgatggatgttaaagtctagcctgatgagaggggaagtggtgggggagacatagccccaccatgaggacatacaactgggaaatactgaaacttgctgcctattgggtatgctgaggccccacagacttacagaagaagtggccctccatagacatgtgtagcatcaaaacacaaaggcccacacttcctgacggatgccagcttgggcactgctgtctactgaccccaacccttgatgatatgtatttattcatttgttattttaccagctaaaaaaaaaaaaaaaaaantcgnggggggncccggnncccanttccccctatagggngncntnttananttcannggccgtctttttacaacgncnngannggaaaanccnnggnnttncccaanttatncccccttgnaaannnnnnnnnnnnnnnnnnnnnnnnnnnnnnnnnnaannnnnnnnnnnnttnnnnnnnnttnnnncnnnntnnaanttnnncnnnnnnnnnnggnnnnnnnnnnngnnnnnccncnnnnnnnnnnnnnnnnttnnnnnnnnnngnnnccccnggnntnnnnnanttnnnnnnnnnnaannnnnngnnnannantntnnnngnnnntnnnnnnnnnnncnnggnnnnncnnnaannanggnnnttttnncnnnnnnnnaanannnnnnnntttggggncnnngnnnncnnnccccnnnnnannnnnnnccnnnnnnnnnntnnnnnnnnnnnnnnnnnnnnnnnnnnan

SEQ ID NO: 1017 - DNA, 2986 bp, Homo sapiens
gcgccccagtcgacgctgagctcctctgctactcagagttgcaacctcagcctcgctatggctcccagcagcccccggcccgcgctgcccgcactcctggtcctgctcggggctctgttcccaggacctggcaatgcccagacatctgtgtccccctcaaaagtcatcctgccccggggaggctccgtgctggtgacatgcagcacctcctgtgaccagcccaagttgttgggcatagagaccccgttgcctaaaaaggagttgctcctgcctgggaacaaccggaaggtgtatgaactgagcaatgtgcaagaagatagccaaccaatgtgctattcaaactgccctgatgggcagtcaacagctaaaaccttcctcaccgtgtactggactccagaacgggtggaactggcacccctcccctcttggcagccagtgggcaagaaccttaccctacgctgccaggtggagggtggggcaccccgggccaacctcaccgtggtgctgctccgtggggagaaggagctgaaacgggagccagctgtgggggagcccgctgaggtcacgaccacggtgctggtgaggagagatcaccatggagccaatttctcgtgccgcactgaactggacctgcggccccaagggctggagctgtttgagaacacctcggccccctaccagctccagacctttgtcctgccagcgactcccccacaacttgtcagcccccgggtcctagaggtggacacgcaggggaccgtggtctgttccctggacgggctgttcccagtctcggaggcccaggtccacctggcactgggggaccagaggttgaaccccacagtcacctatggcaacgactccttctcggccaaggcctcagtcagtgtgaccgcagaggacgagggcacccagcggctgacgtgtgcagtaatactggggaaccagagccaggagacactgcagacagtgaccatctacagctttccggcgcccaacgtgattctgacgaagccagaggtctcagaagggaccgaggtgacagtgaagtgtgaggcccaccctagagccaaggtgacgctgaatggggttccagcccagccactgggcccgagggcccagctcctgctgaaggccaccccagaggacaacgggcgcagcttctcctgctctgcaaccctggaggtggccggccagcttatacacaagaaccagacccgggagcttcgtgtcctgtatggcccccgactggacgagagggattgtccgggaaactggacgtggccagaaaattcccagcagactccaatgtgccaggcttgggggaacccattgcccgagctcaagtgtctaaaggatggcactttcccactgcccatcggggaatcagtgactgtcactcgagatcttgagggcacctacctctgtcgggccaggagcactcaaggggaggtcacccgcgaggtgaccgtgaatgtgctctccccccggtatgagattgtcatcatcactgtggtagcagccgcagtcataatgggcactgcaggcctcagcacgtacctctataaccgccagcggaagatcaagaaatacagactacaacaggcccaaaaagggacccccatgaaaccgaacacacaagccacgcctccctgaacctatcccgggacagggcctcttcctcggccttcccatattggtggcagtggtgccacactgaacagagtggaagacatatgccatgcagctacacctaccggccctgggacgccggaggacagggcattgtcctcagtcagatacaacagcatttggggccatggtacctgcacacctaaaacactaggccacgcatctgatctgtagtcacatgactaagccaagaggaaggagcaagactcaagacatgattgatggatgttaaagtctagcctgatgagaggggaagtggtgggggagacatagccccaccatgaggacatacaactgggaaatactgaaacttgctgcctattgggtatgctgaggcccacagacttacagaagaagtggccctccatagacatgtgtagcatcaaaacacaaaggcccacacttcctgacggatgccagcttgggcactgctgtctactgaccccaacccttgatgatatgtatttattcatttgttattttaccagctatttattgagtgtcttttatgtaggctaaatgaacataggtctctggcctcacggagctcccagtccatgtcacattcaaggtcaccaggtacagttgtacaggttgtacactgcaggagagtgcctggcaaaaagatcaaatggggctgggacttctcattggccaacctgcctttccccagaaggagtgatttttctatcggcacaaaagcactatatggactggtaatggttcacaggttcagagattacccagtgaggccttattcctcccttccccccaaaactgacacctttgttagccacctccccacccacatacatttctgccagtgttcacaatgacactcagcggtcatgtctggacatgagtgcccagggaatatgcccaagctatgccttgtcctcttgtcctgtttgcatttcactgggagcttgcactattgcagctccagtttcctgcagtgatcagggtcctgcaagcagtggggaagggggccaaggtattggaggactccctcccagctttggaagggtcatccgcgtgtgtgtgtgtgtgtatgtgtagacaagctctcgctctgtcacccaggctggagtgcagtggtgcaatcatggttcactgcagtcttgaccttttgggctcaagtgatcctcccacctcagcctcctgagtagctgggaccataggctcacaacaccacacctggcaaatttgattttttttttttttttcagagacggggtctcgcaacattgcccagacttcctttgtgttagttaataaagctttctcaactgcc

SEQ ID NO: 1018 - DNA, 1042 bp, Homo sapiens
  modified_base (867)..(867): a, c, t or g
  modified_base (913)..(913): a, c, t or g
  modified_base (921)..(921): a, c, t or g
  modified_base (933)..(933): a, c, t or g
  modified_base (945)..(945): a, c, t or g
  modified_base (955)..(955): a, c, t or g
  modified_base (959)..(959): a, c, t or g
  modified_base (968)..(968): a, c, t or g
  modified_base (970)..(970): a, c, t or g
  modified_base (981)..(981): a, c, t or g
  modified_base (988)..(988): a, c, t or g
  modified_base (1002)..(1002): a, c, t or g
  modified_base (1016)..(1016): a, c, t or g
cccgcccggagttaccctcactaagggaacaaaagctggagctccaccgcggtggcggccgctctagaactagtggatcccccgggctgcaggaattcggcacgagtgtatgtcgaaaacacagctataattgattgagggagaaacgttaccattttaaagtttatgctttcaagcccagatttggccactaggaatttcccagctcactagtgaaactgctgatgagtgattatttgccagtgagcctttcattctttctaaaatatgtactactagttgtgacttgtaggctataggggctataatatatcaagacaatctttatcctcatgaagcttacagttaagtaagagatagagattaaataattataacaacagagtgaagaacagtgaagaaaaagtacagagttataatatatataatagggccaggactgcatgaggaaggtaggaaagacatttcggcaagaggttgtcagggaaaagacttgcttgagaaagagccaagttgtggggtctggctgcttagcaatgaccataatacctaacttttgctatttttacatgaagtaactaatttaaccctatgaggaaagtactactaccatctagattttacaggtaagtaagcagagatacagagaagttaaactcttcacacggctttggctttaaacctatataggcttcagagcctccccacttaaccactttgccatagctacatccatattaggtgctaagtagatatctgttaagtagaaggaggatgaaaggatagttagctagttggaaaatggatggatgaatgaagtgatgcttaagctaagaacaactttcaggggtaacatgcaaagaatantggagcaagaagaaaaaatagaaaatgggataatcctttccactangggtaccntgtgtgttatcntcttcaggctgngaaggggctncccnaccttatgncngaaagtccccnaaatttnggcctggggaaaancttgctccccaccnaggcctgatcccctgcaaatgaagaa

SEQ ID NO: 1019 - DNA, 1090 bp, Homo sapiens
  modified_base (3)..(3): a, c, t or g
  modified_base (14)..(14): a, c, t or g
  modified_base (41)..(41): a, c, t or g
  modified_base (73)..(73): a, c, t or g
  modified_base (88)..(88): a, c, t or g
  modified_base (132)..(132): a, c, t or g
  modified_base (135)..(135): a, c, t or g
  modified_base (143)..(143): a, c, t or g
  modified_base (218)..(218): a, c, t or g
  modified_base (245)..(245): a, c, t or g
  modified_base (301)..(301): a, c, t or g
  modified_base (311)..(311): a, c, t or g
  modified_base (343)..(343): a, c, t or g
  modified_base (414)..(414): a, c, t or g
  modified_base (438)..(438): a, c, t or g
  modified_base (471)..(471): a, c, t or g
  modified_base (474)..(474): a, c, t or g
  modified_base (490)..(490): a, c, t or g
  modified_base (494)..(494): a, c, t or g
  modified_base (499)..(499): a, c, t or g
  modified_base (505)..(505): a, c, t or g
  modified_base (510)..(510): a, c, t or g
  modified_base (515)..(515): a, c, t or g
  modified_base (521)..(521): a, c, t or g
  modified_base (527)..(527): a, c, t or g
  modified_base (532)..(532): a, c, t or g
  modified_base (561)..(562): a, c, t or g
  modified_base (569)..(570): a, c, t or g
  modified_base (575)..(575): a, c, t or g
  modified_base (577)..(577): a, c, t or g
  modified_base (588)..(589): a, c, t or g
  modified_base (597)..(598): a, c, t or g
  modified_base (609)..(609): a, c, t or g
  modified_base (613)..(615): a, c, t or g
  modified_base (625)..(625): a, c, t or g
  modified_base (636)..(636): a, c, t or g
  modified_base (641)..(641): a, c, t or g
  modified_base (646)..(646): a, c, t or g
  modified_base (651)..(652): a, c, t or g
  modified_base (664)..(664): a, c, t or g
  modified_base (672)..(672): a, c, t or g
  modified_base (674)..(674): a, c, t or g
  modified_base (682)..(682): a, c, t or g
  modified_base (690)..(690): a, c, t or g
  modified_base (693)..(694): a, c, t or g
  modified_base (716)..(716): a, c, t or g
  modified_base (722)..(722): a, c, t or g
  modified_base (726)..(726): a, c, t or g
  modified_base (728)..(728): a, c, t or g
  modified_base (730)..(730): a, c, t or g
  modified_base (732)..(732): a, c, t or g
  modified_base (735)..(736): a, c, t or g
  modified_base (740)..(740): a, c, t or g
  modified_base (742)..(742): a, c, t or g
  modified_base (747)..(747): a, c, t or g
  modified_base (752)..(752): a, c, t or g
  modified_base (754)..(754): a, c, t or g
  modified_base (761)..(762): a, c, t or g
  modified_base (773)..(773): a, c, t or g
  modified_base (779)..(780): a, c, t or g
  modified_base (782)..(783): a, c, t or g
  modified_base (786)..(786): a, c, t or g
  modified_base (791)..(792): a, c, t or g
  modified_base (801)..(801): a, c, t or g
  modified_base (803)..(807): a, c, t or g
  modified_base (811)..(811): a, c, t or g
  modified_base (816)..(816): a, c, t or g
  modified_base (818)..(823): a, c, t or g
  modified_base (834)..(834): a, c, t or g
  modified_base (836)..(837): a, c, t or g
  modified_base (844)..(844): a, c, t or g
  modified_base (848)..(848): a, c, t or g
  modified_base (850)..(850): a, c, t or g
  modified_base (853)..(853): a, c, t or g
  modified_base (855)..(855): a, c, t or g
  modified_base (866)..(867): a, c, t or g
  modified_base (869)..(870): a, c, t or g
  modified_base (874)..(874): a, c, t or g
  modified_base (880)..(880): a, c, t or g
  modified_base (882)..(883): a, c, t or g
  modified_base (885)..(885): a, c, t or g
  modified_base (890)..(891): a, c, t or g
  modified_base (894)..(894): a, c, t or g
  modified_base (899)..(899): a, c, t or g
  modified_base (903)..(903): a, c, t or g
  modified_base (906)..(907): a, c, t or g
  modified_base (910)..(911): a, c, t or g
  modified_base (913)..(913): a, c, t or g
  modified_base (915)..(915): a, c, t or g
  modified_base (924)..(924): a, c, t or g
  modified_base (927)..(927): a, c, t or g
  modified_base (934)..(935): a, c, t or g
  modified_base (940)..(941): a, c, t or g
  modified_base (945)..(947): a, c, t or g
  modified_base (958)..(958): a, c, t or g
  modified_base (961)..(961): a, c, t or g
  modified_base (973)..(973): a, c, t or g
  modified_base (980)..(980): a, c, t or g
  modified_base (982)..(982): a, c, t or g
  modified_base (984)..(984): a, c, t or g
  modified_base (988)..(988): a, c, t or g
  modified_base (996)..(996): a, c, t or g
  modified_base (1001)..(1001): a, c, t or g
  modified_base (1003)..(1003): a, c, t or g
  modified_base (1005)..(1005): a, c, t or g
  modified_base (1007)..(1008): a, c, t or g
  modified_base (1012)..(1012): a, c, t or g
  modified_base (1014)..(1014): a, c, t or g
  modified_base (1016)..(1016): a, c, t or g
  modified_base (1018)..(1019): a, c, t or g
  modified_base (1025)..(1026): a, c, t or g
  modified_base (1035)..(1035): a, c, t or g
  modified_base (1039)..(1041): a, c, t or g
  modified_base (1043)..(1043): a, c, t or g
  modified_base (1047)..(1047): a, c, t or g
  modified_base (1049)..(1050): a, c, t or g
  modified_base (1057)..(1057): a, c, t or g
  modified_base (1066)..(1066): a, c, t or g
  modified_base (1068)..(1068): a, c, t or g
  modified_base (1071)..(1071): a, c, t or g
  modified_base (1075)..(1075): a, c, t or g
  modified_base (1077)..(1078): a, c, t or g
  modified_base (1082)..(1082): a, c, t or g
  modified_base (1084)..(1084): a, c, t or g
  modified_base (1087)..(1088): a, c, t or g
aanggtggacatgnaggtggaggcacaggacgcgttgatgnggcaggatctgatggtctctgtgatgctgatnaatcacagcatgcanaccttccgtctgcgcaccccagacctctccctcacgttactggnagnagcagtgnttggccaggagtgtgaagtacagattgtcttcaataacccccttcccgtcaccctcaccaatgtcatcttccggntcgaaggctctgggttacagaggcccnagatcctcaacgcttggggcacattggaggcaatgaaacagtgacactgcaccagncgtttgtgcntgtgcgaccaggcccccgccagctcattgccngcttggacagcccacagctctcccaggtgcacgggtgtcatccaggtggatgtggccccagcccctggggnatgggggcttcttctcagacgctngaagtgacagtcacttaggagagaccatccctntgncatctcgaggtggagnttanccctntgccangagcnatggntattgnaatcanaagancaaaggactttgccccaagatggggggcnnacttacnngagcnanctccccaggannttcacagnngggggattccngggnnnccccggaaangggaagtcagnctttnacctntgcanngggggggaacanatgcttanantaaactgntttttttnatnnaaaaaaaaaaaaaaaaaaaaantttttncggncncncnaannattntnccctnttagngnggggggnnaaatttttttnttgtgnncnntgngggcnnttttttttnannnnnggtnggggngnnnnnnaaaacccgggntnncataatntatntnttncnagattgggganngnnaaangttttntnnantttcnnttntaaantttnttnnttnntnantttatttanttnaactttnnttttnnttannntaatttttttnttntaatttattttntttttgncntnttgngtatgatnttttntntntnntttntntntnnatttannatattttcntgtnnngnactntnntttattntagttgtgnanatntagnanntttntntcnnta

SEQ ID NO: 1020 - DNA, 2709 bp, Homo sapiens
gggtcctgtcccatccatcctgacctgttccatctcagccccaggactcagtactgcggttgccaacactgctgccaggcatgatggatgggccacgttccgatgtgggccgttggggtggcaaccccttgcagccccctaccacgccatctccagagccagagccagagccagacggacgctctcgcagaggaggaggccgttccttctgggctcgctgctgtggctgctgttcatgccgaaatgcggcagatgacgactggggacctgaaccctctgactccaggggtcgagggtccagctctggcactcgaagacctggctcccggggctcagactcccgccggcctgtatcccggggcagcggtgtcaatgcagctggagatggcaccatccgagagggcatgctagtagtgaacggtgtggacttgctgagctcgcgctcggaccagaaccgccgagagcaccacacagacgagtatgagtacgacgagctgatagtgcgccgcgggcagcctttccatatgctcctcctcctgtcccggacctatgaatcctctgatcgcatcacccttgagttactcatcggaaacaaccccgaggtgggcaagggcacgcacgtgatcatcccagtgggcaaggggggcagtggaggctggaaagcccaggtggtcaaggccagtgggcagaatctgaacctgcgggtccacacttcccccaacgccatcatcggcaagtttcagttcacagtccgcacacaatcagacgctggggagttccagttgccctttgacccccgcaatgagatctacatcctcttcaacccctggtgcccagaggacattgtgtacgtggaccatgaggattggcggcaggagtatgttcttaatgagtctgggagaatttactacgggaccgaagcacagattggtgagcggacctggaactacggccagtttgaccacggggtgctggatgcctgcttatacatcctggaccggcgggggatgccatatggaggccgtggagacccagtcaatgtctcccgggtcatctctgccatggtgaactccctggatgacaatggagtcctgattgggaactggtctggtgattactcccgaggcaccaacccatcagcgtgggtgggcagcgtggagatcctgcttagctacctacgcacgggatattccgtcccctatggccagtgctgggtctttgctggagtgaccaccacagtgctgcgctgcctgggtctggccacccgtactgtcaccaacttcaactccgcccacgacacagacacatcccttaccatggacatctacttcgacgagaacatgaagcccctggagcacctgaaccatgattctgtctggaacttccatgtgtggaacgactgctggatgaagaggccggatctgccctcgggctttgatgggtggcaggtggtggatgccacaccccaagagactagcagtggcatcttctgctgcggcccctgctctgtggagtccatcaagaatggcctggtctacatgaagtacgacacgcctttcatttttgctgaggtgaatagtgacaaggtgtactggcagcggcaggatgatggcagcttcaagattgtttatgtggaggagaaggccatcggcacactcattgtcacaaaggccatcagctccaacatgcgggaggacatcacctacctctataagcacccagaaggctcagacgcagagcggaaggcagtagagacagcagcagcccacggcagcaaacccaatgtgtatgccaaccggggctcagcggaggatgtggccatgcaggtggaggcacaggacgcggtgatggggcaggatctgatggtctctgtgatgctgatcaatcacagcagcagccgccgcacagtgaaactgcacctctacctctcagtcactttctatactggtgtcagtggtaccatcttcaaggagaccaagaaggaagtggagctggcaccaggggcctcggaccgtgtgaccatgccagtggcctacaaggaataccggccccatcttgtggaccagggggccatgctgctcaatgtctcaggccacgtcaaggagagcgggcaggtgctggccaagcagcacaccttccgtctgcgcaccccagacctctccctcacgttactgggagcagcagtggttggccaggagtgtgaagtacagattgtcttcaagaacccccttcccgtcaccctcaccaatgtcgtcttccggctcgaaggctctgggttacagaggcccaagatcctcaacgttggggacattggaggcaatgaaacagtgacactgcgccagtcgtttgtgcctgtgcgaccaggcccccgccagctcattgccagcttggacagcccacagctctcccaggtgcacggtgtcatccaggtggatgtggccccagcccctggggatgggggcttcttctcagacgctggaggtgacagtcacttaggagagaccatccctatggcatctcgaggtggagcttagccctgtgccaggagcaatgggactggagtcagatgagcaaggacattgccccaagataggggcacactacagagcagctccccaggagctcaggtggggagtccagggctcccggagagggagtcagtcttcacttgcactgggggaacagatgctaataaactgttttttaatg

SEQ ID NO: 1021 - DNA, 1426 bp, Homo sapiens
  modified_base (6)..(6): a, c, t or g
  modified_base (45)..(45): a, c, t or g
  modified_base (54)..(54): a, c, t or g
  modified_base (245)..(245): a, c, t or g
  modified_base (841)..(841): a, c, t or g
  modified_base (882)..(882): a, c, t or g
  modified_base (915)..(915): a, c, t or g
  modified_base (962)..(962): a, c, t or g
  modified_base (971)..(971): a, c, t or g
  modified_base (973)..(974): a, c, t or g
  modified_base (976)..(976): a, c, t or g
  modified_base (981)..(981): a, c, t or g
  modified_base (983)..(983): a, c, t or g
  modified_base (991)..(991): a, c, t or g
  modified_base (1014)..(1014): a, c, t or g
  modified_base (1016)..(1016): a, c, t or g
  modified_base (1019)..(1019): a, c, t or g
  modified_base (1023)..(1023): a, c, t or g
  modified_base (1026)..(1026): a, c, t or g
  modified_base (1029)..(1029): a, c, t or g
  modified_base (1031)..(1031): a, c, t or g
  modified_base (1038)..(1038): a, c, t or g
  modified_base (1044)..(1044): a, c, t or g
  modified_base (1047)..(1047): a, c, t or g
  modified_base (1050)..(1050): a, c, t or g
  modified_base (1060)..(1060): a, c, t or g
  modified_base (1064)..(1064): a, c, t or g
  modified_base (1068)..(1069): a, c, t or g
  modified_base (1080)..(1081): a, c, t or g
  modified_base (1088)..(1089): a, c, t or g
  modified_base (1092)..(1092): a, c, t or g
  modified_base (1107)..(1107): a, c, t or g
  modified_base (1126)..(1126): a, c, t or g
  modified_base (1144)..(1144): a, c, t or g
  modified_base (1148)..(1148): a, c, t or g
  modified_base (1166)..(1166): a, c, t or g
  modified_base (1172)..(1175): a, c, t or g
  modified_base (1181)..(1181): a, c, t or g
  modified_base (1186)..(1187): a, c, t or g
  modified_base (1208)..(1209): a, c, t or g
  modified_base (1219)..(1219): a, c, t or g
  modified_base (1221)..(1221): a, c, t or g
  modified_base (1227)..(1227): a, c, t or g
  modified_base (1234)..(1235): a, c, t or g
  modified_base (1269)..(1270): a, c, t or g
  modified_base (1275)..(1276): a, c, t or g
  modified_base (1278)..(1281): a, c, t or g
  modified_base (1287)..(1287): a, c, t or g
  modified_base (1289)..(1289): a, c, t or g
  modified_base (1291)..(1291): a, c, t or g
  modified_base (1299)..(1299): a, c, t or g
  modified_base (1309)..(1310): a, c, t or g
  modified_base (1313)..(1313): a, c, t or g
  modified_base (1318)..(1318): a, c, t or g
  modified_base (1324)..(1324): a, c, t or g
  modified_base (1329)..(1329): a, c, t or g
  modified_base (1334)..(1336): a, c, t or g
  modified_base (1338)..(1338): a, c, t or g
  modified_base (1353)..(1353): a, c, t or g
  modified_base (1355)..(1359): a, c, t or g
  modified_base (1372)..(1372): a, c, t or g
  modified_base (1381)..(1381): a, c, t or g
  modified_base (1385)..(1385): a, c, t or g
  modified_base (1391)..(1392): a, c, t or g
  modified_base (1394)..(1394): a, c, t or g
  modified_base (1400)..(1400): a, c, t or g
  modified_base (1406)..(1407): a, c, t or g
  modified_base (1417)..(1417): a, c, t or g
  modified_base (1420)..(1420): a, c, t or g
  modified_base (1422)..(1422): a, c, t or g
  modified_base (1425)..(1425): a, c, t or g
cagatngaattatacgactcactatagggaatttggccctcgagnacaagaatncggcacgagggtgaattcccccctcacctggatgtatatatagaagacccacacttgcctccctcactaggactacttccaggagcccgggtccacttcagccagttggagaaaagggtttccagatctcacaatgtttattgttgtttccggtcatccacttatgtgcaggtcctgagttttccccctgnagaccaccatcagcgttcccctgccccacatctacctggctgaacttctgcagggtggtcagtccccattccaggccactgcctcttgccatatcgtctctgtcttcagccttcagctcttctgggtgtgtgcttattgtaccagcatctgccggcagggaaagtgcactcgcctgggctccacttgccctacgcagacagctataagccaggccatcatcaggctcctggtggaggatgggactgccgaagccgtggtgacctgtaggaatcaccatgtggcagcagcactagggctgtgtcctagagagtgggcctccctcctagatttcgtccaagtgccaggcagagtggtcttgcagtttgcagggcctggagcccaacttgagtcttcagccagggttgacgagcccatgaccatgttcctctggacactttgtactagcccctctgtcctccgtcctattgtgctttcttttgagctggaaaggaaaccgtcgaagatcgtcccattagaacctcctcggctacagcgattccagtgtggagagctccctttcctgactcacgtgaaccccaggctccgattgtcctgncctttctatccgagagtcagagtactccagctctctggggnatccttgcttcctccctgttaactgaactgcanggatggcctgagagtccttcccttgctgaaaacctgaaggcctaggntcctggccncnncnccctnantgttctgngatttaaccaagggactccagantncanaaantgntancncaactanaaattnccnttncttggggttntggngcanncctgcccttgnnaaattgnnggnaaagggaaatatggnccttttaaaatttcccttnttggggaaaaggaacttnattnaagggggcccttaaaccntggttnnnnttttcnaaganntgaggaaaaaaaaatttcccnngggggtattntnaagccntttaccnnaaaaacccttggttaaaaaaaaaaaaaaaaaaanngggcnngnnnntccccnangnggtatttnggggggcgcnnttnaaagngggaanccgcnccccnnncnggggggggggggggncnnnnnggggggggtgggnaacaccccngggngggggnncncccccncggggnncccccccgtnggngnggnt

SEQ ID NO: 1022 - DNA, 4022 bp, Homo sapiens
aaggcgcatcatggcggctggccgggcccaggtcccttcctccgaacaagcctggcttgaggatgctcaggtcttcatccaaaagaccctgtgtccagctgtcaaggagcctaatgtccagttgactccattggtaattgattgtgtgaagactgtctggttgtcccagggaaggaaccaaggttctacactgcccctcagctatagcttcgtctcagtacaggacctcaagactcaccagcgtctcccatgctgcagccacctgtcgtggagcagtagtgcataccaggcctgggcccaagaggctggaccaaatgggaaccccctgccccgagagcagctgttacttttagggacactaacagacctatcggcagacttggaacaagagtgcaggaacggaagcctctatgtgagagataacactggcgtcctgagctgtgagctcatagacctggacctttcttggttgggccatctttttctgttcccccgttggagttacctccctcctgccaggtggaattcctcaggggaagggcacttggagctgtgggatgcccctgtgccagtgtttcctttgaccatcagtcctggccccgtcacgcctatccctgtcctctacccagagagtgcttcctgcctgctcaggctcagaaacaagctcagaggtgtgcagcgaaacctggctgggagtctagttcgattgagtgctctggtgaaaagtaaacagaaagcttacttcatcctgtctcttggtagatcacacccagctgtcacccacgtgtccatcatcgtgcaggtccctgcccagctggtgtggcacagagcccttcggcctggtacagcctatgtgctgacagaactgcgagtgtccaagatccgtggtcagcgccagcatgtttggatgaccagtcagtcctcccgtctgttgctgctgaaaccagaatgtgtgcaggagctggaactggagctggaaggacccctcttagaggctgatcccaagccactccccatgcccagcaactcggaggacaagaaggatccagaaagtcttgtccggtattctagactcctatcctattcgggagcagtcactggcgtgttgaatgagcccgctggcctctatgagctggatgggcagctggggctttgccttgcctaccagcagttccgtggccttaggcgggtgatgcgacctggagtgtgtctgcagctccaggatgttcacctgctccagtcagtgggaggggggacaagaaggccagtgctcgccccctgcctccgtggcgccgttctgcttcaaagcttctctcgtcagaagcctggggctcactcatcccgtcaagcctacggggcctccctgtacgagcagctggtgtgggaacgtcagttaggacttcccctctacctgtgggctaccaaggccctggaggagctggcctgcaagctgtgtccccatgtgctgagacaccaccagttcctgcaacattcctctcctgggagccccagcctgggactgcaactcctggctcctaccctggatcttctagctccgccaggcagccctgttcggaatgcacacaatgagatccttgaagagccacatcactgtcccctccagaaatacactcggctgcagactccctcctccttccccactctggccaccctgaaagaagaaggacagcgtaaggcctgggcctcctttgaccctaaggcccttctgcccctcccggaggcctcctacctgcccagctgccaactcaatcgccgcctggcttggtcctggctctgtctgctgccctctgccttctgcccagcccaggttttacttggggttctggtggcttcatctcataaaggttgtctgcaacttcgggaccaaagtggttccctgccctgcctgctcctggccaagcactctcaacccctcagtgacccacggctgataggctgcctggtgcgggcagagaggtttcagttgatcgtagagagggacgtgagaagcatcttcccttcctggaaggagctgagcatgccaggcttcatccagaagcagcaggccagagtctatgtccagttctttctggctgatgccctgatcctgcctgtgcccagaccctgccttcattcagcaacaccctcaacacctcagacagatcccaccggcccagagggaccccacctaggacagagccggctcttcttgctctgccacaaggaggccctcatgaagcgtaatttttgtgtccccccaggagcaagtccagaggtgcccaagcccgccctcagtttctatgtgttggggagctggcttgggggcacccagaggaaggagggtactggatgggggctgcccgagccccagggaaatgacgacaatgatcagaaggttcacctcattttctttggctcttcagtccgctggtttgagttcttgcacccgggacaggtgtaccgactcgtagctcctggccccgctacaccaatgttgtttgaaaaggatggttcatcctgcatatctcggcgtcctctggagttggctggctgtgcatcctgcctcactgtccaggacaactggactctggagcttgaaagctcccaggatatccaagatgtgctggatgcaaacaagtcattgcctgaatcctcactgaccgacctgctcagtgacaatttcacagattccttggtgtctttctccgctgagattttgtcacggacactatgtgaaccccttgtggcgtctctctggatgaaactggggaacacgggggccatgagaaggtgtgtgaagctaacagtcgctcttgagactgctgaatgtgaattcccccctcacctggatgtatatatagaagacccacacttgcctccctcactaggactacttccaggagcccgggtccacttcagccagttggagaaaagggtttccagatctcacaatgtttattgttgtttccggtcatccacttatgtgcaggtcctgagttttccccctgagaccaccatcagcgttcccctgccccacatctacctggctgaacttctgcagggtggtcagtccccattccaggccactgcctcttgccatatcgtctctgtcttcagccttcagctcttctgggtgtgtgcttattgtaccagcatctgccggcagggaaagtgcactcgcctgggctccacttgccctacgcagacagctataagccaggccatcatcaggctcctggtggaggatgggactgccgaagccgtggtgacctgtaggaatcaccatgtggcagcagcactagggctgtgtcctagagagtgggcctccctcctagatttcgtccaagtgccaggcagagtggtcttgcagtttgcagggcctggagcccaacttgagtcttcagccagggttgacgagcccatgaccatgttcctctggacactttgtactagcccctctgtcctccgtcctattgtgctttcttttgagctggaaaggaaaccgtcgaagatcgtcccattagaacctcctcggctacagcgattccagtgtggagagctccctttcctgactcacgtgaaccccaggctccgattgtcctgcctttctatccgagagtcagagtactccagctctctggggatccttgcttcctcctgttaactgaactgcaaggatggcctgagagtccttccttgctgaaaacctgaaggcctaggtcctggctcctctccctacttgttctgtgattgaaccaaggactccagattcacaaactgctactccactataatttcccttctttggtgttctggtgccagcctgccttggcaaaattgtggcaacaggaaatcatggccctattaatatgtcctctgattgggacaaggcacctgcattcacaggcggccctgagcacctgggttctgactttgtcacaggagctgagggaacaaaagacttgctcgctgtggggtgatggtgacaggcctattgacctgcaatgaagccctctggtgtc

SEQ ID NO: 1023 - DNA, 1412 bp, Homo sapiens
  modified_base (39)..(39): a, c, t or g
  modified_base (674)..(674): a, c, t or g
  modified_base (832)..(832): a, c, t or g
  modified_base (890)..(890): a, c, t or g
  modified_base (963)..(964): a, c, t or g
  modified_base (966)..(966): a, c, t or g
  modified_base (968)..(968): a, c, t or g
  modified_base (972)..(972): a, c, t or g
  modified_base (974)..(974): a, c, t or g
  modified_base (989)..(989): a, c, t or g
  modified_base (996)..(997): a, c, t or g
  modified_base (1010)..(1010): a, c, t or g
  modified_base (1014)..(1014): a, c, t or g
  modified_base (1024)..(1024): a, c, t or g
  modified_base (1027)..(1027): a, c, t or g
  modified_base (1040)..(1040): a, c, t or g
  modified_base (1042)..(1042): a, c, t or g
  modified_base (1047)..(1047): a, c, t or g
  modified_base (1052)..(1052): a, c, t or g
  modified_base (1059)..(1059): a, c, t or g
  modified_base (1061)..(1061): a, c, t or g
  modified_base (1070)..(1070): a, c, t or g
  modified_base (1073)..(1074): a, c, t or g
  modified_base (1078)..(1078): a, c, t or g
  modified_base (1080)..(1080): a, c, t or g
  modified_base (1087)..(1088): a, c, t or g
  modified_base (1091)..(1092): a, c, t or g
  modified_base (1097)..(1097): a, c, t or g
  modified_base (1102)..(1102): a, c, t or g
  modified_base (1110)..(1110): a, c, t or g
  modified_base (1112)..(1112): a, c, t or g
  modified_base (1116)..(1116): a, c, t or g
  modified_base (1121)..(1122): a, c, t or g
  modified_base (1132)..(1132): a, c, t or g
  modified_base (1139)..(1140): a, c, t or g
  modified_base (1142)..(1143): a, c, t or g
  modified_base (1148)..(1150): a, c, t or g
  modified_base (1152)..(1152): a, c, t or g
  modified_base (1154)..(1154): a, c, t or g
  modified_base (1160)..(1160): a, c, t or g
  modified_base (1171)..(1172): a, c, t or g
  modified_base (1179)..(1179): a, c, t or g
  modified_base (1182)..(1183): a, c, t or g
  modified_base (1186)..(1186): a, c, t or g
  modified_base (1189)..(1189): a, c, t or g
  modified_base (1191)..(1193): a, c, t or g
  modified_base (1197)..(1197): a, c, t or g
  modified_base (1200)..(1200): a, c, t or g
  modified_base (1207)..(1208): a, c, t or g
  modified_base (1212)..(1212): a, c, t or g
  modified_base (1217)..(1218): a, c, t or g
  modified_base (1221)..(1221): a, c, t or g
  modified_base (1225)..(1229): a, c, t or g
  modified_base (1232)..(1232): a, c, t or g
  modified_base (1234)..(1235): a, c, t or g
  modified_base (1243)..(1243): a, c, t or g
  modified_base (1245)..(1245): a, c, t or g
  modified_base (1252)..(1252): a, c, t or g
  modified_base (1258)..(1260): a, c, t or g
  modified_base (1273)..(1273): a, c, t or g
  modified_base (1280)..(1280): a, c, t or g
  modified_base (1282)..(1283): a, c, t or g
  modified_base (1286)..(1289): a, c, t or g
  modified_base (1292)..(1292): a, c, t or g
  modified_base (1299)..(1300): a, c, t or g
  modified_base (1304)..(1310): a, c, t or g
  modified_base (1312)..(1316): a, c, t or g
  modified_base (1318)..(1318): a, c, t or g
  modified_base (1320)..(1321): a, c, t or g
  modified_base (1328)..(1330): a, c, t or g
  modified_base (1333)..(1333): a, c, t or g
  modified_base (1335)..(1335): a, c, t or g
  modified_base (1337)..(1337): a, c, t or g
  modified_base (1339)..(1339): a, c, t or g
  modified_base (1341)..(1342): a, c, t or g
  modified_base (1344)..(1345): a, c, t or g
  modified_base (1349)..(1349): a, c, t or g
  modified_base (1351)..(1352): a, c, t or g
  modified_base (1354)..(1355): a, c, t or g
  modified_base (1357)..(1360): a, c, t or g
  modified_base (1362)..(1363): a, c, t or g
  modified_base (1365)..(1366): a, c, t or g
  modified_base (1368)..(1368): a, c, t or g
  modified_base (1372)..(1380): a, c, t or g
  modified_base (1382)..(1382): a, c, t or g
  modified_base (1384)..(1393): a, c, t or g
  modified_base (1395)..(1398): a, c, t or g
  modified_base (1400)..(1403): a, c, t or g
  modified_base (1406)..(1407): a, c, t or g
cagatcgaatttaatacgactcactataggggaatttcngccctcgcaggccaagaattcggcacgaggtttaacagtagcaaggctgatctcgtctggcatgtcaggagccagagatatttttatatcaaaaattgtccacaagtcatttgtggaagtgaatgaagagggaacagaggcggcagctgccacagcaggcatcgcaactttctgcatgttgatgcccgaagaaaatttcactgccgaccatccattccttttctttattcggcataattcctcaggtagcatcctattcttggggagattttcttccccttagaagaaagagactgtagcaatacaaaaatcaagcttagtgctttattacctgagtttttaatagagccaatatgtcttatatctttaccaataaaaccactgtccagaaacaagtctttcattttctttgtaagtttggctctgttggctgtttacacccatgaattttggcatgggtatctatttttcttttttacattgaaaaaaatccagtggttgcttttgaatgcatcaagtaaagaagaagaaaagaatacatccgatgcgtagattcttgaccatgtagtaatctataaaattgctatatcctcctgatagccatgggaaaacatgataagatggtcatttatttngcagttagaattttggaagccacaaaatagacagacaccctgactgttgaagggaggtttaaaaacagatattcaattgaaatgtaagagagcaccccaattgagagcccaggttacgaagacaagcttgcctcgcctgacttttcctgtcccttgtnctgcaggattagtattctgttacagacctctagtttttagactcttcaattaaagggncaatggttataaaaaaaaaaaaaaaaaagggggggccccgaacctttttcccctttaggggggggtaattttnngntngggngngggggggggtttttnaaagggnnggggaggggaaancccnggggttcccnaanttaatccccttgnanggggnaattngggcggntncccaaatgnggnncccngnggggggnnttnnccaangttancccccccncngggnccgtnngggggggganccccaannannccccnnnanangggccngggggggggtnntcccccnacnnccnccnannntgtnttnttggggnnttcnccccnnccncccnnnnnggngnngggggggncnccccccncccccnnnggggggggggggnggccccncnnccnnnnggngcggggnngggnnnnnnncnnnnngngnnggggggnnngcncncncncnngnngggngnngnngnnnncnncnncngggnnnnnnnnncncnnnnnnnnnngnnnngnnnnccnnccggg

SEQ ID NO: 1024 - DNA, 1310 bp, Homo sapiens
gctcggagcccggagcgtgcctcggcggcctgtcggttttcaccatggagcagctgagctcagcaaacacccgcttcgccttggacctgttcctggcgttgagtgagaacaatccggctggaaacatcttcatctctcccttcagcatttcatctgctatggccatggtttttctggggaccagaggtaacacggcagcacagctgtccaagactttccatttcaacacggttgaagaggttcattcaagattccagagtctgaatgctgatatcaacaaacgtggagcgtcttatattctgaaacttgctaatagattatatggagagaaaacttacaatttccttcctgagttcttggtttcgactcagaaaacatatggtgctgacctggccagtgtggattttcagcatgcctctgaagatgcaaggaagaccataaaccagtgggtcaaaggacagacagaaggaaaaattccggaactgttggcttcgggcatggttgataacatgaccaaacttgtgctagtaaatgccatctatttcaagggaaactggaaggataaattcatgaaagaagccacgacgaatgcaccattcagattgaataagaaagacagaaaaactgtgaaaatgatgtatcagaagaaaaaatttgcatatggctacatcgaggaccttaagtgccgtgtgctggaactgccttaccaaggcgaggagctcagcatggtcatcctgctgccggatgacattgaggacgagtccacgggcctgaagaagattgaggaacagttgactttggaaaagttgcatgagtggactaaacctgagaatctcgatttcattgaagttaatgtcagcttgcccaggttcaaactggaagagagttacactctcaactccgacctcgcccgcctaggtgtgcaggatctctttaacagtagcaaggctgatctgtctggcatgtcaggagccagagatatttttatatcaaaaattgtccacaagtcatttgtggaagtgaatgaagagggaacagaggcggcagctgccacagcaggcatcgcaactttctgcatgttgatgcccgaagaaaatttcactgccgaccatccattccttttctttattcggcataattcctcaggtagcatcctattcttggggagattttcttccccttagaagaaagagactgtagcaatacaaaaatcaagcttagtgctttattacctgagtttttaatagagccaatatgtcttatatctttaccaataaaaccactgtccagaaaaaaaaaaaaaaaaaaaa

SEQ ID NO: 1025 - DNA, 1415 bp, Homo sapiens
  modified_base (11)..(11): a, c, t or g
  modified_base (709)..(709): a, c, t or g
  modified_base (753)..(753): a, c, t or g
  modified_base (812)..(812): a, c, t or g
  modified_base (839)..(839): a, c, t or g
  modified_base (858)..(858): a, c, t or g
  modified_base (871)..(871): a, c, t or g
  modified_base (896)..(896): a, c, t or g
  modified_base (911)..(911): a, c, t or g
  modified_base (926)..(926): a, c, t or g
  modified_base (931)..(931): a, c, t or g
  modified_base (935)..(935): a, c, t or g
  modified_base (938)..(939): a, c, t or g
  modified_base (945)..(945): a, c, t or g
  modified_base (977)..(977): a, c, t or g
  modified_base (987)..(987): a, c, t or g
  modified_base (992)..(992): a, c, t or g
  modified_base (1001)..(1001): a, c, t or g
  modified_base (1010)..(1010): a, c, t or g
  modified_base (1018)..(1018): a, c, t or g
  modified_base (1026)..(1026): a, c, t or g
  modified_base (1028)..(1028): a, c, t or g
  modified_base (1031)..(1031): a, c, t or g
  modified_base (1037)..(1037): a, c, t or g
  modified_base (1070)..(1070): a, c, t or g
  modified_base (1073)..(1074): a, c, t or g
  modified_base (1078)..(1078): a, c, t or g
  modified_base (1082)..(1082): a, c, t or g
  modified_base (1084)..(1084): a, c, t or g
  modified_base (1093)..(1093): a, c, t or g
  modified_base (1095)..(1096): a, c, t or g
  modified_base (1099)..(1100): a, c, t or g
  modified_base (1102)..(1102): a, c, t or g
  modified_base (1105)..(1105): a, c, t or g
  modified_base (1107)..(1107): a, c, t or g
  modified_base (1113)..(1113): a, c, t or g
  modified_base (1115)..(1115): a, c, t or g
  modified_base (1121)..(1121): a, c, t or g
  modified_base (1123)..(1124): a, c, t or g
  modified_base (1138)..(1138): a, c, t or g
  modified_base (1144)..(1144): a, c, t or g
  modified_base (1148)..(1148): a, c, t or g
  modified_base (1151)..(1154): a, c, t or g
  modified_base (1156)..(1156): a, c, t or g
  modified_base (1159)..(1159): a, c, t or g
  modified_base (1166)..(1176): a, c, t or g
  modified_base (1179)..(1185): a, c, t or g
  modified_base (1191)..(1191): a, c, t or g
  modified_base (1201)..(1202): a, c, t or g
  modified_base (1205)..(1208): a, c, t or g
  modified_base (1210)..(1210): a, c, t or g
  modified_base (1212)..(1213): a, c, t or g
  modified_base (1226)..(1226): a, c, t or g
  modified_base (1232)..(1233): a, c, t or g
  modified_base (1235)..(1239): a, c, t or g
  modified_base (1242)..(1243): a, c, t or g
  modified_base (1245)..(1415): a, c, t or g
cagagcgaatnaatacgactcactataggggaatttggccctcgcaggccaagaattcggcacgaggctgtcttcattttcatgagtaccttgtagaaaactattaataatgataaataactaaacttctctagattaccttaatttttttgttgttgttctcagtacatctaagagagtagcatataggccatgtgtatgtggtgataaatgaaaatgcaggggtcttacttggttatttaggacttaagattttatctagtcattttcaactgtgattgaacacttccctttaactcccttcagaaactccaagatcatattgtatcccaggtactagaatttctgttcagctgtttataggcctccaccacaagaaattggctccaaacctattcccattacatcatcacccactaatgtcattacaccagaatgaaatctgctttgaggcttgtattgttgttttccttccatttctttcccctcatcatttcctttagaaggaaaagggaaggaaaaaaaaagaaaaaaatcagagacctgtaaacatttaagagtgaattggacatccccacaggctaaacctagagttgtcagctttcattccattctgctgtgatagagtgttctgcccagtatgtatccacatggagcctggaaagtaacaagtctggtcatgtgacaactggctttggtgctttgcttncagcccctcagaattagttcctaatggctcacatagctccctgnccagcatcccgtcactggcacgttaaacctttttcaaataattcctcagaatagagatncttaggagagcactaaatttctccatncttggtgtttaattaaacngtcctggcatttnaatattggccaaatagcgcttaaanattacgatacaggtngagtatccttaatcngaaantcgnaanncggaantttttggagcccgacatgacgcccaaggaaangcccttttcnatttnggatttcanattggggangcccaccngtaagttnangcnaacttntcccaaaaaaaaaaaaaaaaattccgggggcgnaannttancccntnggggggggntnnttnngnggncngggggncntttaangnngggagggaaaaccnggggtnccantannnngnggnaaggggnnnnnnnnnnncannnnnnngggggngggggggggnnccnnnncncnngggggggggggcngccccnncnnnnnggnngnnnnnnnnnnnnnnnnnnnnnnnnnnnnnnnnnnnnnnnnnnnnnnnnnnnnnnnnnnnnnnnnnnnnnnnnnnnnnnnnnnnnnnnnnnnnnnnnnnnnnnnnnnnnnnnnnnnnnnnnnnnnnnnnnnnnnnnnnnnnnnnnnnnnnnnnnnnnnnnnnnnnnnnnnnn

SEQ ID NO: 1026 - DNA, 1371 bp, Homo sapiens
  modified_base (5)..(12): a, c, t or g
  modified_base (18)..(18): a, c, t or g
  modified_base (46)..(46): a, c, t or g
  modified_base (810)..(810): a, c, t or g
  modified_base (817)..(817): a, c, t or g
  modified_base (862)..(862): a, c, t or g
  modified_base (876)..(876): a, c, t or g
  modified_base (889)..(889): a, c, t or g
  modified_base (893)..(893): a, c, t or g
  modified_base (898)..(898): a, c, t or g
  modified_base (900)..(900): a, c, t or g
  modified_base (923)..(923): a, c, t or g
  modified_base (947)..(947): a, c, t or g
  modified_base (957)..(957): a, c, t or g
  modified_base (967)..(967): a, c, t or g
  modified_base (975)..(975): a, c, t or g
  modified_base (980)..(980): a, c, t or g
  modified_base (983)..(983): a, c, t or g
  modified_base (991)..(991): a, c, t or g
  modified_base (994)..(994): a, c, t or g
  modified_base (1001)..(1001): a, c, t or g
  modified_base (1007)..(1008): a, c, t or g
  modified_base (1011)..(1011): a, c, t or g
  modified_base (1018)..(1018): a, c, t or g
  modified_base (1021)..(1021): a, c, t or g
  modified_base (1024)..(1024): a, c, t or g
  modified_base (1029)..(1029): a, c, t or g
  modified_base (1032)..(1033): a, c, t or g
  modified_base (1038)..(1039): a, c, t or g
  modified_base (1041)..(1041): a, c, t or g
  modified_base (1044)..(1044): a, c, t or g
  modified_base (1048)..(1048): a, c, t or g
  modified_base (1053)..(1053): a, c, t or g
  modified_base (1057)..(1058): a, c, t or g
  modified_base (1060)..(1061): a, c, t or g
  modified_base (1072)..(1072): a, c, t or g
  modified_base (1075)..(1076): a, c, t or g
  modified_base (1078)..(1078): a, c, t or g
  modified_base (1094)..(1094): a, c, t or g
  modified_base (1098)..(1099): a, c, t or g
  modified_base (1106)..(1107): a, c, t or g
  modified_base (1110)..(1111): a, c, t or g
  modified_base (1121)..(1122): a, c, t or g
  modified_base (1126)..(1126): a, c, t or g
  modified_base (1128)..(1128): a, c, t or g
  modified_base (1132)..(1133): a, c, t or g
  modified_base (1137)..(1138): a, c, t or g
  modified_base (1159)..(1160): a, c, t or g
  modified_base (1163)..(1163): a, c, t or g
  modified_base (1166)..(1166): a, c, t or g
  modified_base (1168)..(1170): a, c, t or g
  modified_base (1173)..(1174): a, c, t or g
  modified_base (1177)..(1178): a, c, t or g
  modified_base (1184)..(1184): a, c, t or g
  modified_base (1188)..(1188): a, c, t or g
  modified_base (1191)..(1191): a, c, t or g
  modified_base (1194)..(1195): a, c, t or g
  modified_base (1197)..(1197): a, c, t or g
  modified_base (1199)..(1199): a, c, t or g
  modified_base (1203)..(1204): a, c, t or g
  modified_base (1206)..(1206): a, c, t or g
  modified_base (1208)..(1209): a, c, t or g
  modified_base (1211)..(1225): a, c, t or g
  modified_base (1227)..(1231): a, c, t or g
  modified_base (1233)..(1233): a, c, t or g
  modified_base (1235)..(1235): a, c, t or g
  modified_base (1237)..(1241): a, c, t or g
  modified_base (1246)..(1247): a, c, t or g
  modified_base (1250)..(1251): a, c, t or g
  modified_base (1254)..(1254): a, c, t or g
  modified_base (1257)..(1257): a, c, t or g
  modified_base (1259)..(1260): a, c, t or g
  modified_base (1265)..(1266): a, c, t or g
  modified_base (1274)..(1274): a, c, t or g
  modified_base (1277)..(1277): a, c, t or g
  modified_base (1279)..(1279): a, c, t or g
  modified_base (1286)..(1287): a, c, t or g
  modified_base (1290)..(1290): a, c, t or g
  modified_base (1292)..(1293): a, c, t or g
  modified_base (1296)..(1296): a, c, t or g
  modified_base (1301)..(1301): a, c, t or g
  modified_base (1303)..(1304): a, c, t or g
  modified_base (1306)..(1306): a, c, t or g
  modified_base (1308)..(1309): a, c, t or g
  modified_base (1311)..(1319): a, c, t or g
  modified_base (1321)..(1322): a, c, t or g
  modified_base (1324)..(1324): a, c, t or g
  modified_base (1326)..(1326): a, c, t or g
  modified_base (1328)..(1331): a, c, t or g
  modified_base (1333)..(1334): a, c, t or g
  modified_base (1336)..(1336): a, c, t or g
  modified_base (1338)..(1339): a, c, t or g
  modified_base (1341)..(1343): a, c, t or g
  modified_base (1347)..(1347): a, c, t or g
  modified_base (1349)..(1352): a, c, t or g
  modified_base (1354)..(1356): a, c, t or g
  modified_base (1358)..(1358): a, c, t or g
  modified_base (1361)..(1363): a, c, t or g
  modified_base (1366)..(1367): a, c, t or g
  modified_base (1371)..(1371): a, c, t or g
ggggnnnnnnnncagagngaattaatacgactcactatagggaatntggccctcgaggccaagaattcggcacgaggggctcccccgcatgcatggggatttctccccagaccagcatacttgtgacctgagagttcaatgtgtaaagatgcccctggtcagccatatccatcttctcttgcctggtccttgattctctggccgctccctgaccttcctccttccactgccttgactttcttcctttttattcctggtgccatctgtccaggcagctagacaagaacttgttcaccagcagccggattcaggccttcccaggggcataataagtgaccagcccctcctctccggacatcagatccaacacataaggaccctggcctaccctccagcccaacagccagttctgggtcagctgccaacttaggggtggtttgattatcccattgaaattcaccagtgcctttgccaaagaccctctcatttggacatacccagattcattccctggctccaactgaaaagactcagtttcaatcgttaaaagttcctttagggccagaagaataaatgaattataatcccattttgaagaaccgatttataaccaatgaaaaggttataatgtaatttatattcttggaggaacaagattttcatttgggattatttccttcaaccattcaacaaacatttgttgtatgccactaagcgccaggcacggcgttgggctctgcaaacacagtggttagtagcagtctggacctggtccctactggcatgggaacccatcactccccaacatgnaaagccnacatttaaaggccagcctctgccccttcagtgatgcgctctttanaaatgccagtccantatattcagaaanccgnagggnanaaaactttccagcaagtcactgntgtggtgaaatgggcagtgggggntgggggggtnttttttaaanaggccccnttccnatntaccttgnccngtacccnttcaanngangtcccanaanccnccaanaanntggtnntnccntttnggggnaaannannccctggctttnggnngncaaagccccaaatttntccnnccccaanngtnnaaaaaccaanngccnanttgnngggnntttgcttggaaaattaaaaanntgncantnnnttnnggnntttggntaanggnggnntnangggnntncnncnnnnnnnnnnnnnnntnnnnngncnannnnnggggnnaanngcnccncnnatgtnnaaaggggntgntnaaaaaannttnannggnccccncnnananncnnnnnnnnntnngngngnnnnanncncnnannnaaancnnnncnnntnttnnngcnncggn

SEQ ID NO: 1027 - DNA, 2348 bp, Homo sapiens
cgcacctgctgcaggtgctcccggccgccccggaccagcgagcgcgggcactgcggcggggaggatgctgcgcgagcggaccgtgcggctgcagtacgggagccgcgtggaggcggtgtacgtgctgggcacctacctctggaccgatgtctacagcgcggccccagccggggcccaaaccttcagcctgaagcactcggaacacgtgtgggtggaggtggtgcgtgatggggaggctgaggaggtggccaccaatggcaagcagcgctggcttctctcgcccagcaccaccctgcgggtcaccatgagccaggcgagcaccgaggccagcagtgacaaggtcaccgtcaactactatgacgaggaagggagcattcccatcgaccaggcggggctcttcctcacagccattgagatctccctggatgtggacgcagaccgggatggtgtggtggagaagaacaacccaaagaaggcatcctggacctggggccccgagggccagggggccatcctgctggtgaactgtgaccgagagacaccctggttgcccaaggaggactgccgtgatgagaaggtctacagcaaggaagatctcaaggacatgtcccagatgatcctgcggaccaaaggccccgaccgcctccccgccggatacgagatagttctgtacatttccatgtcagactcagacaaagtgggcgtgttctacgtggagaacccgttcttcggccaacgctatatccacatcctgggccggcggaagctctaccatgtggtcaagtacacgggtggctccgcggagctgctgttcttcgtggaaggcctctgtttccccgacgagggcttctcaggcctggtctccatccatgtcagcctgctggagtacatggcccaggacattcccctgactcccatcttcacggacaccgtgatattccggattgctccgtggatcatgacccccaacatcctgcctcccgtgtcggtgtttgtgtgctgcatgaaggataattacctgttcctgaaagaggtgaagaaccttgtggagaaaaccaactgtgagctgaaggtctgcttccagtacctaaaccgaggcgatcgctggatccaggatgaaattgagtttggctacatcgaggccccccataaaggcttccccgtggtgctggactctccccgagatggaaacctaaaggacttccctgtgaaggagctcctgggcccagattttggctacgtgacccgggagcccctctttgagtctgtcaccagccttgactcatttggaaacctggaggtcagtcccccagtgaccgtgaacggcaagacatacccgcttggccgcatcctcatcgggagcagctttcctctgtctggtggtcggaggatgaccaaggtggtgcgtgacttcctgaaggcccagcaggtgcaggcacccgtggagctctactcagactggctgactgtgggccacgtggatgagttcatgtcctttgtccccatccccggcacaaagaaattcctgctactcatggccagcacctcggcctgctacaagctcttccgagagaagcagaaggacggccatggagaggccatcatgttcaaaggcttgggtgggatgagcagcaagcgaatcaccatcaacaagattctgtccaacgagagccttgtgcaggagaacctgtacttccagcgctgcctggactggaaccgtgacatcctcaagaaggagctgggactgacagagcaggacatcattgacctgcccgctctgttcaagatggacgaggaccaccgtgccagagccttcttcccaaacatggtgaacatgatcgtgctggacaaggacctgggcatccccaagccattcgggccacaggttgaggaggaatgctgcctggagatgcacgtgcgtggcctcctggagcccctgggcctcgaatgcaccttcatcgacgacatttctgcctaccacaaatttctgggggaagtccactgtggcaccaacgtccgcaggaagcccttcaccttcaagtggttgcacatggtgccctgacctgccaggggccctggcgtttgcctccttcgcttagttctccagaccctccctcacacgcccagagccttctgctgacatggactggacagccccgctgggagacctttgggacgtggggtggaatttggggtatctgtgccttgccctccctgagaggggcctcagtgtcctctgaagccatccccagtgagcctcgactctgtccctgctgaaaatagctgggccagtgtctctgtagccctgacataaggaacagaacacaacaaaacacagcaaaccatgt

SEQ ID NO: 1028 - DNA, 1349 bp, Homo sapiens
  modified_base (5)..(12): a, c, t or g
  modified_base (19)..(19): a, c, t or g
  modified_base (23)..(23): a, c, t or g
  modified_base (50)..(50): a, c, t or g
  modified_base (59)..(59): a, c, t or g
  modified_base (408)..(408): a, c, t or g
  modified_base (437)..(437): a, c, t or g
  modified_base (505)..(505): a, c, t or g
  modified_base (513)..(513): a, c, t or g
  modified_base (521)..(521): a, c, t or g
  modified_base (554)..(554): a, c, t or g
  modified_base (557)..(557): a, c, t or g
  modified_base (590)..(590): a, c, t or g
  modified_base (622)..(622): a, c, t or g
  modified_base (652)..(652): a, c, t or g
  modified_base (710)..(710): a, c, t or g
  modified_base (717)..(717): a, c, t or g
  modified_base (741)..(741): a, c, t or g
  modified_base (757)..(757): a, c, t or g
  modified_base (762)..(762): a, c, t or g
  modified_base (764)..(765): a, c, t or g
  modified_base (772)..(772): a, c, t or g
  modified_base (774)..(775): a, c, t or g
  modified_base (780)..(781): a, c, t or g
  modified_base (783)..(783): a, c, t or g
  modified_base (793)..(793): a, c, t or g
  modified_base (801)..(801): a, c, t or g
  modified_base (803)..(803): a, c, t or g
  modified_base (807)..(807): a, c, t or g
  modified_base (809)..(810): a, c, t or g
  modified_base (812)..(813): a, c, t or g
  modified_base (815)..(816): a, c, t or g
  modified_base (820)..(820): a, c, t or g
  modified_base (822)..(822): a, c, t or g
  modified_base (825)..(825): a, c, t or g
  modified_base (827)..(827): a, c, t or g
  modified_base (829)..(829): a, c, t or g
  modified_base (843)..(843): a, c, t or g
  modified_base (845)..(846): a, c, t or g
  modified_base (849)..(850): a, c, t or g
  modified_base (852)..(852): a, c, t or g
  modified_base (855)..(856): a, c, t or g
  modified_base (860)..(864): a, c, t or g
  modified_base (866)..(866): a, c, t or g
  modified_base (873)..(875): a, c, t or g
  modified_base (885)..(885): a, c, t or g
  modified_base (889)..(890): a, c, t or g
  modified_base (894)..(896): a, c, t or g
  modified_base (900)..(900): a, c, t or g
  modified_base (904)..(905): a, c, t or g
  modified_base (907)..(907): a, c, t or g
  modified_base (909)..(909): a, c, t or g
  modified_base (913)..(913): a, c, t or g
  modified_base (919)..(919): a, c, t or g
  modified_base (925)..(925): a, c, t or g
  modified_base (927)..(927): a, c, t or g
  modified_base (929)..(932): a, c, t or g
  modified_base (934)..(934): a, c, t or g
  modified_base (936)..(939): a, c, t or g
  modified_base (941)..(941): a, c, t or g
  modified_base (944)..(945): a, c, t or g
  modified_base (950)..(953): a, c, t or g
  modified_base (955)..(956): a, c, t or g
  modified_base (960)..(962): a, c, t or g
  modified_base (965)..(970): a, c, t or g
  modified_base (975)..(975): a, c, t or g
  modified_base (977)..(977): a, c, t or g
  modified_base (979)..(979): a, c, t or g
  modified_base (981)..(983): a, c, t or g
  modified_base (985)..(990): a, c, t or g
  modified_base (992)..(995): a, c, t or g
  modified_base (998)..(999): a, c, t or g
  modified_base (1002)..(1005): a, c, t or g
  modified_base (1007)..(1007): a, c, t or g
  modified_base (1009)..(1010): a, c, t or g
  modified_base (1013)..(1013): a, c, t or g
  modified_base (1017)..(1027): a, c, t or g
  modified_base (1029)..(1035): a, c, t or g
  modified_base (1038)..(1040): a, c, t or g
  modified_base (1046)..(1052): a, c, t or g
  modified_base (1054)..(1059): a, c, t or g
  modified_base (1061)..(1066): a, c, t or g
  modified_base (1069)..(1069): a, c, t or g
  modified_base (1071)..(1074): a, c, t or g
  modified_base (1077)..(1080): a, c, t or g
  modified_base (1082)..(1087): a, c, t or g
  modified_base (1089)..(1089): a, c, t or g
  modified_base (1091)..(1096): a, c, t or g
  modified_base (1098)..(1098): a, c, t or g
  modified_base (1101)..(1101): a, c, t or g
  modified_base (1103)..(1104): a, c, t or g
  modified_base (1106)..(1107): a, c, t or g
  modified_base (1109)..(1111): a, c, t or g
  modified_base (1113)..(1139): a, c, t or g
  modified_base (1143)..(1148): a, c, t or g
  modified_base (1151)..(1156): a, c, t or g
  modified_base (1158)..(1160): a, c, t or g
  modified_base (1163)..(1164): a, c, t or g
  modified_base (1166)..(1180): a, c, t or g
  modified_base (1182)..(1185): a, c, t or g
  modified_base (1187)..(1187): a, c, t or g
  modified_base (1189)..(1194): a, c, t or g
  modified_base (1196)..(1200): a, c, t or g
  modified_base (1203)..(1210): a, c, t or g
  modified_base (1213)..(1230): a, c, t or g
  modified_base (1232)..(1242): a, c, t or g
  modified_base (1244)..(1244): a, c, t or g
  modified_base (1246)..(1251): a, c, t or g
  modified_base (1253)..(1265): a, c, t or g
  modified_base (1268)..(1268): a, c, t or g
  modified_base (1270)..(1292): a, c, t or g
  modified_base (1294)..(1294): a, c, t or g
  modified_base (1296)..(1296): a, c, t or g
  modified_base (1310)..(1314): a, c, t or g
  modified_base (1316)..(1336): a, c, t or g
  modified_base (1338)..(1347): a, c, t or g
  modified_base (1349)..(1349): a, c, t or g
ggggnnnnnnnncagattngaanttaatacgactcactatagggaatttngccctcgangccaagaattcggcacgaggggagctaacccatcagtgtttttagagaaagctcaccttgtccctgttacctggagtccaaggcttctgccactaagcccggccaagcattcgggtgggacagccgccaccaagccaggtgtctggggtctcagtgtcctggatgactccatctgcaagaccaaggcgagtttctccagggccacgaggcagcgcctggctccggcagctgggcacgtccagggcagaggctgtgcttctggattggggcgtcctcaccatgccccagcccaggcgtctcccccaggccttccttctggagagacaccttattcgtgcctgtctcttanagcctcaagtttgattgaagaagcagaanttggcatagacacctttgagcattcaagctctcgccgggcctgctgcaggcatttcaaggcatcttancccatcgntttaattnaggacagaggccacggagaggcaccgatggaancanttacactgcacaccacagggtggctgcactttntgggtggtggggtggggatgggggcaggtatnatcaatcatccaaaccagggcatttttaanagtaaaaggaggctctactgataacatgctgcaacaacagatgtgacttaggaacggncggtganatggggagggcctatcaccctatncttggggggctgcttnttcananngatcatnanncctannanaaaatcccanctccccanangcananngnnannctgnanccnananaagggtcctcctgnanncanngnaannttgnnnnnancctccannncacccctacnaggnnttannnatanaaannananatanaccggnaaaagncntnnnntnannnntntcnnaaatnnnnanncccnnnagnnnnnnttttnangnannngnnnnnngnnnncannaannnntntnnttnaaannnnnnnnnnntnnnnnnnttnnnccaaannnnnnngnnnnnnannnnnnccncnnnnaannnngnnnnnntnannnnnncnccncnnanngnnncnnnnnnnnnnnnnnnnnnnnnnnnnnnaaannnnnnaannnnnncnnnttnnannnnnnnnnnnnnnnannnncncnnnnnncnnnnnggnnnnnnnntcnnnnnnnnnnnnnnnnnntnnnnnnnnnnntntnnnnnngnnnnnnnnnnnnnaanannnnnnnnnnnnnnnnnnnnnnntntnaaaaaaaaaaaaannnnngnnnnnnnnnnnnnnnnnnnnnannnnnnnnnntn

SEQ ID NO: 1029 - DNA, 1372 bp, Homo sapiens
  modified_base (4)..(4): a, c, t or g
  modified_base (7)..(7): a, c, t or g
  modified_base (24)..(24): a, c, t or g
  modified_base (57)..(57): a, c, t or g
  modified_base (719)..(719): a, c, t or g
  modified_base (733)..(733): a, c, t or g
  modified_base (742)..(742): a, c, t or g
  modified_base (764)..(764): a, c, t or g
  modified_base (766)..(766): a, c, t or g
  modified_base (768)..(768): a, c, t or g
  modified_base (784)..(785): a, c, t or g
  modified_base (787)..(823): a, c, t or g
  modified_base (842)..(842): a, c, t or g
  modified_base (844)..(844): a, c, t or g
  modified_base (847)..(849): a, c, t or g
  modified_base (870)..(870): a, c, t or g
  modified_base (877)..(877): a, c, t or g
  modified_base (879)..(881): a, c, t or g
  modified_base (885)..(886): a, c, t or g
  modified_base (891)..(892): a, c, t or g
  modified_base (896)..(896): a, c, t or g
  modified_base (906)..(906): a, c, t or g
  modified_base (908)..(909): a, c, t or g
  modified_base (913)..(913): a, c, t or g
  modified_base (923)..(923): a, c, t or g
  modified_base (930)..(930): a, c, t or g
  modified_base (932)..(933): a, c, t or g
  modified_base (942)..(944): a, c, t or g
  modified_base (953)..(957): a, c, t or g
  modified_base (959)..(966): a, c, t or g
  modified_base (968)..(968): a, c, t or g
  modified_base (972)..(972): a, c, t or g
  modified_base (975)..(976): a, c, t or g
  modified_base (978)..(978): a, c, t or g
  modified_base (981)..(982): a, c, t or g
  modified_base (986)..(986): a, c, t or g
  modified_base (994)..(996): a, c, t or g
  modified_base (1000)..(1008): a, c, t or g
  modified_base (1010)..(1011): a, c, t or g
  modified_base (1017)..(1024): a, c, t or g
  modified_base (1026)..(1026): a, c, t or g
  modified_base (1037)..(1048): a, c, t or g
  modified_base (1056)..(1070): a, c, t or g
  modified_base (1074)..(1074): a, c, t or g
  modified_base (1076)..(1087): a, c, t or g
  modified_base (1094)..(1104): a, c, t or g
  modified_base (1112)..(1113): a, c, t or g
  modified_base (1115)..(1123): a, c, t or g
  modified_base (1130)..(1138): a, c, t or g
  modified_base (1140)..(1141): a, c, t or g
  modified_base (1148)..(1158): a, c, t or g
  modified_base (1160)..(1160): a, c, t or g
  modified_base (1167)..(1172): a, c, t or g
  modified_base (1174)..(1176): a, c, t or g
  modified_base (1184)..(1195): a, c, t or g
  modified_base (1203)..(1203): a, c, t or g
  modified_base (1205)..(1206): a, c, t or g
  modified_base (1210)..(1210): a, c, t or g
  modified_base (1219)..(1222): a, c, t or g
  modified_base (1235)..(1235): a, c, t or g
  modified_base (1237)..(1239): a, c, t or g
  modified_base (1242)..(1242): a, c, t or g
  modified_base (1244)..(1244): a, c, t or g
  modified_base (1247)..(1251): a, c, t or g
  modified_base (1265)..(1266): a, c, t or g
  modified_base (1272)..(1273): a, c, t or g
  modified_base (1276)..(1279): a, c, t or g
  modified_base (1282)..(1282): a, c, t or g
  modified_base (1300)..(1302): a, c, t or g
  modified_base (1309)..(1309): a, c, t or g
  modified_base (1313)..(1313): a, c, t or g
  modified_base (1320)..(1320): a, c, t or g
  modified_base (1323)..(1327): a, c, t or g
  modified_base (1330)..(1334): a, c, t or g
  modified_base (1336)..(1336): a, c, t or g
  modified_base (1339)..(1340): a, c, t or g
  modified_base (1342)..(1343): a, c, t or g
  modified_base (1345)..(1346): a, c, t or g
  modified_base (1348)..(1353): a, c, t or g
  modified_base (1355)..(1355): a, c, t or g
  modified_base (1357)..(1367): a, c, t or g
  modified_base (1369)..(1372): a, c, t or g
cagntcnaagttatacgactcacnatagaggaatttcggccctcggaggcccacganttcgtgcacgaggaaaaaaaactggaaaatgtaagcaaggtggacgcattgcttctcggtactcagaaaggttatctgaatttgcgtggtaagcgctggcctgaagatgtacacaagttaaagccatattttatctggtgagccccttaactgtttctgaaggaatgaatggtcagccgggaaggtgtccggcttagaccttgacaacagacactacccatctgtcagccatgtgcagtggttagaactcttcttgaaagtccaaagagcctttaaaatgtgtataatttgtgttttgttgcttctatttctattgattagatgaaaagacattctggccctctgatcctctttcttctccacaaaagttttacaaataaaagatgttcccctaaatacagaatatggctttaagaagaaaatgaaatgaagaattaaattaagatttcagtgttggggaaaaaaatacagcttctggatgactggattgcataacattgccctggcctcacattgtactaggatgcagcttaaatgaagtcatctctaaatctactaacctttcaccttcttatcaaaactttttgaatagacacacactgtacagttcaattgttagagaacctaactactgtagagattgttaaatttttttttttttnggcaaaattccagnctgtaaaancttttcaccttccacaatattnantnaaggtacccccggccnngnnnnnnnnnnnnnnnnnnnnnnnnnnnnnnnnnnnnnaaagggggggccccccccncnccnnncttgggggggggttttttttnggggggngnnngggnnttttnnaaangggggggggngnnaaancccccggggnccccccnannttccccccnnnggggggggnnnnngnnnnnnnncncccnaanngnggnncggngggggggnnntttnnnnnnnnncnncccaannnnnnnngnggggggggggnnnnnnnnnnnncccccccnnnnnnnnnnnnnnngggngnnnnnnnnnnnnccccccnnnnnnnnnnngggggggnntnnnnnnnnnccccccnnnnnnnnngnnggggggnnnnnnnnnnncnccccccnnnnnngnnngggggggnnnnnnnnnnnncccccccncnngggnggggggggnnnnccccccccccccncnnnggngnggnnnnncccccccccccccnngggggnnggnnnngcncccccccccggggggggnnnccccccncccnggggggnggnnnnnccnnnnngnggnngnncnncnnnnnngngnnnnnnnnnnntnnnn

SEQ ID NO: 1030 - DNA, 2762 bp, Homo sapiens
gccaagcatacatctctaattttattattttggtcttttcgttggattttccctttcttctttttttcgggttatcgctcagttttgagcagaggtttacattttttaaaaatttgctttccagcccgccttgatcttctaagtgcgagttcatcgtctgagaaaaaaaaaaatctctggttggcgtttttgtttcttttcttttctttcttttctttcctttttttttttttttaatttttttcaagggggaggagattttccacaagaaaaggttgttttcatgtttgggattcaggaaagcatccaacggagtggaagcagcatgaaggaagagccgctgggcagcggcatgaacgcggtgcggacgtggatgcagggcgccggggtgctggacgccaacacggcggcgcagagcggggtgggtctggcccgggctcactttgagaagcagccgccttccaatctgcggaaatccaacttcttccacttcgtcctggccctctacgacagacagggccagcccgtggagatcgagaggacagcgtttgtggggttcgtggagaaggaaaaagaagccaacagcgaaaagaccaataacggaattcactaccggcttcagcttctctacagcaatgggataaggacggagcaggatttctacgtgcgcctcattgactccatgacaaaacaagccatagtgtatgaaggccaagacaagaacccagaaatgtgccgagtcttgctcacacatgagatcatgtgcagccgctgttgtgacaagaaaagctgtggcaaccgaaatgagactccctcagatccagtgataattgacaggttcttcttgaaatttttcctcaaatgtaaccaaaattgcctaaagaatgcgggaaacccacgtgacatgcggagattccaggtcgtggtgtctacgacagtcaatgtggatggccatgtcctggcagtctctgataacatgtttgtccataataattccaagcatgggcggagggctcggaggcttgacccctcggaaggtacgccctcttatctggaacatgctactccctgtatcaaagccatcagcccgagtgaaggatggacgacgggaggtgcgactgtgatcatcataggggacaatttctttgatgggttacaggtcatattcggtaccatgctggtctggagtgagttgatcactcctcatgccatccgtgtgcagacccctcctcggcacatccctggtgttgtggaagtcacactgtcctacaaatctaagcagttctgcaaaggaacaccaggcagattcatttatacagcgctcaacgaacccaccatcgattatggtttccagaggttacagaaggtcattcctcggcaccctggtgaccctgagcgtttgccaaaggaagtaatactcaaaagggctgcggatctggtagaagcactgtatgggatgccacacaacaaccaggaaatcattctgaagagagcggccgacattgccgaggccctgtacagtgttccccgcaaccacaaccaactcccggcccttgctaacacctcggtccacgcagggatgatgggcgtgaattcgttcagtggacaactggccgtgaatgtctccgaggcatcacaagccaccaatcagggtttcacccgcaactcaagcagcgtatcaccacacgggtacgtgccgagcaccactccccagcagaccaactataactccgtcaccacgagcatgaacggatacggctctgccgcaatgtccaatttgggcggctcccccaccttcctcaacggctcagctgccaactccccctatgccatagtgccatccagccccaccatggcctcctccacaagcctcccctccaactgcagcagctcctcgggcatcttctccttctcaccagccaacatggtctcagccgtgaaacagaagagtgctttcgcaccagtcgtcagaccccagacctccccacctcccacctgcaccagcaccaacgggaacagcctgcaagcgatatctggcatgattgttcctcctatgtgaaagaattgccttgaagaattgtattaatgaagaggttggattctgctacagagagtaatctgatacaagtcccagagtggaacttttaactcaggcctttttaagaggaatcacaataactgcagatttttaaacaaacaaaatcaccgaccttgcaaatactgaaattggaagagggatctgcaagtgcagggtgttggttaaagttgtacctcccaagtatttgggggatatatttattctgtattgacaaaagcaaatccactttttctttttcttttttttttttaagcttaattctgcaatcatttgtcttttataaaccgtaaagctctatacaagggacactataaataagactccatgttttaatttatgatgtttttaaagctgtgtaaaggaagaatgaagtggtgatatttacaaaaaagtaaaaaaaaaaaaaaagaaaaaaaggaaaaaaaaaaaaaaaaaaaaaaaaaaataggaatgccagttagattttttagaaaaactaagggtcggcttttgcgccttaaagcatatcaaatggtagttagctcagacagtgcattttcaatatctaacttaacatgccaccccttagcagtgcaagcttatttatctcttttgtattgttgtcttaagcaactgtgtaaataaatgcagcctggaaagttaaaacgcgaaaaaaaaaaaaaaa

SEQ ID NO: 1031 - DNA, 1297 bp, Homo sapiens
  modified_base (3)..(3): a, c, t or g
  modified_base (49)..(49): a, c, t or g
  modified_base (65)..(65): a, c, t or g
  modified_base (121)..(121): a, c, t or g
  modified_base (124)..(124): a, c, t or g
  modified_base (127)..(127): a, c, t or g
  modified_base (134)..(134): a, c, t or g
  modified_base (158)..(158): a, c, t or g
  modified_base (177)..(177): a, c, t or g
  modified_base (213)..(213): a, c, t or g
  modified_base (215)..(215): a, c, t or g
  modified_base (221)..(221): a, c, t or g
  modified_base (289)..(289): a, c, t or g
  modified_base (293)..(293): a, c, t or g
  modified_base (323)..(323): a, c, t or g
  modified_base (342)..(342): a, c, t or g
  modified_base (350)..(350): a, c, t or g
  modified_base (352)..(352): a, c, t or g
  modified_base (356)..(356): a, c, t or g
  modified_base (358)..(358): a, c, t or g
  modified_base (362)..(362): a, c, t or g
  modified_base (367)..(367): a, c, t or g
  modified_base (369)..(369): a, c, t or g
  modified_base (372)..(372): a, c, t or g
  modified_base (390)..(390): a, c, t or g
  modified_base (403)..(403): a, c, t or g
  modified_base (409)..(409): a, c, t or g
  modified_base (449)..(449): a, c, t or g
  modified_base (459)..(459): a, c, t or g
  modified_base (461)..(461): a, c, t or g
  modified_base (480)..(480): a, c, t or g
  modified_base (487)..(487): a, c, t or g
  modified_base (502)..(502): a, c, t or g
  modified_base (517)..(517): a, c, t or g
  modified_base (519)..(519): a, c, t or g
  modified_base (533)..(533): a, c, t or g
  modified_base (542)..(542): a, c, t or g
  modified_base (552)..(552): a, c, t or g
  modified_base (580)..(580): a, c, t or g
  modified_base (584)..(584): a, c, t or g
  modified_base (614)..(614): a, c, t or g
  modified_base (704)..(705): a, c, t or g
  modified_base (766)..(766): a, c, t or g
  modified_base (786)..(786): a, c, t or g
  modified_base (797)..(797): a, c, t or g
  modified_base (844)..(844): a, c, t or g
  modified_base (864)..(864): a, c, t or g
  modified_base (879)..(879): a, c, t or g
  modified_base (902)..(902): a, c, t or g
  modified_base (915)..(915): a, c, t or g
  modified_base (927)..(927): a, c, t or g
  modified_base (937)..(937): a, c, t or g
  modified_base (944)..(944): a, c, t or g
  modified_base (965)..(965): a, c, t or g
  modified_base (975)..(975): a, c, t or g
  modified_base (979)..(979): a, c, t or g
  modified_base (990)..(992): a, c, t or g
  modified_base (1000)..(1002): a, c, t or g
  modified_base (1008)..(1008): a, c, t or g
  modified_base (1011)..(1011): a, c, t or g
  modified_base (1016)..(1017): a, c, t or g
  modified_base (1025)..(1025): a, c, t or g
  modified_base (1036)..(1037): a, c, t or g
  modified_base (1040)..(1040): a, c, t or g
  modified_base (1043)..(1043): a, c, t or g
  modified_base (1056)..(1060): a, c, t or g
  modified_base (1066)..(1296): a, c, t or g
atngaattatacgactcactatagggaatttcggccctcggaggccaanaattcggcacgaggcngcacgaggggtttcacggctgccaggttttctgggtgtccaaaggaagacgtgtgncantantgggccntccgacagccccctctgccgactncccacggccgctccagggntggctggagacgggtgggcggctggagaccatgcanancgccgngagttctcagggctcctgccttctgtcctggtgtcacttactgtttctgtcaggagagcagcggggcnaagnccaggcccctttgtcactccctccatcaanaatggggatcacagaaacnttcctccnanccgngnagtntcttncntgncttcttctttgtgctgtngtttctaaacaanaatcantctatccacagagagtcccactgcctcaggttcctatggntggccactgnanagagctctccagatccaanacctgtnggttccaagccctgnagccaactgctgctntntgaggtggcacttnttcatttgnctattcccanacctccacagttcagtggcagggctcangatntcgtgggtctgttttcctttctcaccgcantcgtcgcacagtctctctctctctctcccctcagagtctgcaactttaagcagctcttgctaatcagtgtctcacactggcgtagaagtnnttgtactgtaaagagacctacctcaggttgctggttgctgtgtggtttggtgtgttcccgnaaaccccctttgtgctgtgnggctgggtaantcaggtgggcgtggtcactgctgtcatcaattgaatggtcagcgttncatgtcgtgaccaactaganattctgtcgccttancatgtttgctgaacaccttgtgnaaacaaaaatctnaaaatgtgaatnaaattatttnggatttngtaaaaaaaaaaaaaaaaaangggggggggnaaantttttcccttnnnggggggtnnnttttanggnggggnngggccccntttttaaaaanntgngtngaaaaacccgggnnnnnaaaaannnnnnnnnnnnnnnnnnnnnnnnnnnnnnnnnnnnnnnnnnnnnnnnnnnnnnnnnnnnnnnnnnnnnnnnnnnnnnnnnnnnnnnnnnnnnnnnnnnnnnnnnnnnnnnnnnnnnnnnnnnnnnnnnnnnnnnnnnnnnnnnnnnnnnnnnnnnnnnnnnnnnnnnnnnnnnnnnnnnnnnnnnnnnnnnnnnnnnnnnnnnnnnnnnnnnnnnnnnnnnnnnnnnnnna

SEQ ID NO: 1032 - DNA, 5851 bp, Homo sapiens
cttgcgcggtgtggcggccgatgccgctataaaggcttgttttgctgcagggctcatgctcgggagcgtggttgagcggctggcgcggttgtcctggagcaggggcgcaggaattctgatgtgaaactaacagtctgtgagccctggaacctccactcagagaagatgaaggatatcgacataggaaaagagtatatcatccccagtcctgggtatagaagtgtgagggagagaaccagcacttctgggacgcacagagaccgtgaagattccaagttcaggagaactcgaccgttggaatgccaagatgccttggaaacagcagcccgagccgagggcctctctcttgatgcctccatgcattctcagctcagaatcctggatgaggagcatcccaagggaaagtaccatcatggcttgagtgctctgaagcccatccggactacttccaaacaccagcacccagtggacaatgctgggcttttttcctgtatgactttttcgtggctttcttctctggcccgtgtggcccacaagaagggggagctctcaatggaagacgtgtggtctctgtccaagcacgagtcttctgacgtgaactgcagaagactagagagactgtggcaagaagagctgaatgaagttgggccagacgctgcttccctgcgaagggttgtgtggatcttctgccgcaccaggctcatcctgtccatcgtgtgcctgatgatcacgcagctggctggcttcagtggaccagccttcatggtgaaacacctcttggagtatacccaggcaacagagtctaacctgcagtacagcttgttgttagtgctgggcctcctcctgacggaaatcgtgcggtcttggtcgcttgcactgacttgggcattgaattaccgaaccggtgtccgcttgcggggggccatcctaaccatggcatttaagaagatccttaagttaaagaacattaaagagaaatccctgggtgagctcatcaacatttgctccaacgatgggcagagaatgtttgaggcagcagccgttggcagcctgctggctggaggacccgttgttgccatcttaggcatgatttataatgtaattattctgggaccaacaggcttcctgggatcagctgtttttatcctcttttacccagcaatgatgtttgcatcacggctcacagcatatttcaggagaaaatgcgtggccgccacggatgaacgtgtccagaagatgaatgaagttcttacttacattaaatttatcaaaatgtatgcctgggtcaaagcattttctcagagtgttcaaaaaatccgcgaggaggagcgtcggatattggaaaaagctgggtacttccagagcatcactgtgggtgtggctcccattgtggtggtgattgccagcgtggtgaccttctctgttcatatgaccctgggcttcgatctgacagcagcacaggctttcacagtggtgacagtcttcaattccatgacttttgctttgaaagtaacaccgttttcagtaaagtccctctcagaagcctcagtggctgttgacagatttaagagtttgtttctaatggaagaggttcacatgataaagaacaaaccagccagtcctcacatcaagatagagatgaaaaatgccaccttggcatgggactcctcccactccagtatccagaactcgcccaagctgacccccaaaatgaaaaaagacaagagggcttccaggggcaagaaagagaaggtgaggcagctgcagcgcactgagcatcaggcggtgctggcagagcagaaaggccacctcctcctggacagtgacgagcggcccagtcccgaagaggaagaaggcaagcacatccacctgggccacctgcgcttacagaggacactgcacagcatcgatctggagatccaagagggtaaactggttggaatctgtggcagtgtgggaagtggaaaaacctctctcatttcagccattttaggccagatgacgcttctagagggcagcattgcaatcagtggaaccttcgcttatgtggcccagcaggcctggatcctcaatgctactctgagagacaacatcctgtttgggaaggaatatgatgaagaaagatacaactctgtgctgaacagctgctgcctgaggcctgacctggccattcttcccagcagcgacctgacggagattggagagcgaggagccaacctgagcggtgggcagcgccagaggatcagccttgcccgggccttgtatagtgacaggagcatctacatcctggacgaccccctcagtgccttagatgcccatgtgggcaaccacatcttcaatagtgctatccggaaacatctcaagtccaagacagttctgtttgttacccaccagttacagtacctggttgactgtgatgaagtgatcttcatgaaagagggctgtattacggaaagaggcacccatgaggaactgatgaatttaaatggtgactatgctaccatttttaataacctgttgctgggagagacaccgccagttgagatcaattcaaaaaaggaaaccagtggttcacagaagaagtcacaagacaagggtcctaaaacaggatcagtaaagaaggaaaaagcagtaaagccagaggaagggcagcttgtgcagctggaagagaaagggcagggttcagtgccctggtcagtatatggtgtctacatccaggctgctgggggccccttggcattcctggttattatggcccttttcatgctgaatgtaggcagcaccgccttcagcacctggtggttgagttactggatcaagcaaggaagcgggaacaccactgtgactcgagggaacgagacctcggtgagtgacagcatgaaggacaatcctcatatgcagtactatgccagcatctacgccctctccatggcagtcatgctgatcctgaaagccattcgaggagttgtctttgtcaagggcacgctgcgagcttcctcccggctgcatgacgagcttttccgaaggatccttcgaagccctatgaagttttttgacacgacccccacagggaggattctcaacaggttttccaaagacatggatgaagttgacgtgcggctgccgttccaggccgagatgttcatccagaacgttatcctggtgttcttctgtgtgggaatgatcgcaggagtcttcccgtggttccttgtggcagtggggccccttgtcatcctcttttcagtcctgcacattgtctccagggtcctgattcgggagctgaagcgtctggacaatatcacgcagtcacctttcctctcccacatcacgtccagcatacagggccttgccaccatccacgcctacaataaagggcaggagtttctgcacagataccaggagctgctggatgacaaccaagctcctttttttttgtttacgtgtgcgatgcggtggctggctgtgcggctggacctcatcagcatcgccctcatcaccaccacggggctgatgatcgttcttatgcacgggcagattcccccagcctatgcgggtctcgccatctcttatgctgtccagttaacggggctgttccagtttacggtcagactggcatctgagacagaagctcgattcacctcggtggagaggatcaatcactacattaagactctgtccttggaagcacctgccagaattaagaacaaggctccctcccctgactggccccaggagggagaggtgacctttgagaacgcagagatgaggtaccgagaaaacctccctctcgtcctaaagaaagtatccttcacgatcaaacctaaagagaagattggcattgtggggcggacaggatcagggaagtcctcgctggggatggccctcttccgtctggtggagttatctggaggctgcatcaagattgatggagtgagaatcagtgatattggccttgccgacctccgaagcaaactctctatcattcctcaagagccggtgctgttcagtggcactgtcagatcaaatttggaccccttcaaccagtacactgaagaccagatttgggatgccctggagaggacacacatgaaagaatgtattgctcagctacctctgaaacttgaatctgaagtgatggagaatggggataacttctcagtgggggaacggcagctcttgtgcatagctagagccctgctccgccactgtaagattctgattttagatgaagccacagctgccatggacacagagacagacttattgattcaagagaccatccgagaagcatttgcagactgtaccatgctgaccattgcccatcgcctgcacacggttctaggctccgataggattatggtgctggcccagggacaggtggtggagtttgacaccccatcggtccttctgtccaacgacagttcccgattctatgccatgtttgctgctgcagagaacaaggtcgctgtcaagggctgactcctccctgttgacgaagtctcttttctttagagcattgccattccctgcctggggcgggcccctcatcgcgtcctcctaccgaaaccttgcctttctcgattttatctttcgcacagcagttccggattggcttgtgtgtttcacttttagggagagtcatattttgattattgtatttattccatattcatgtaaacaaaatttagtttttgttcttaattgcactctaaaaggttcagggaaccgttattataattgtatcagaggcctataatgaagctttatacgtgtagctatatctatatataattctgtacatagcctatatttacagtgaaaatgtaagctgtttattttatattaaaataagcactgtgctaataacagtgcatattcctttctatcatttttgtacagtttgctgtactagagatctggttttgctattagactgtaggaagagtagcatttcattcttctctagctggtggtttcacggtgccaggttttctgggtgtccaaaggaagacgtgtggcaatagtgggccctccgacagccccctctgccgcctccccacggccgctccaggggtggctggagacgggtgggcggctggagaccatgcagagcgccgtgagttctcagggctcctgccttctgtcctggtgtcacttactgtttctgtcaggagagcagcggggcgaagcccaggccccttttcactccctccatcaagaatggggatcacagagacattcctccgagccggggagtttctttcctgccttcttctttttgctgttgtttctaaacaagaatcagtctatccacagagagtcccactgcctcaggttcctatggctggccactgcacagagctctccagctccaagacctgttggttccaagccctggagccaactgctgctttttgaggtggcactttttcatttgcctattcccacacctccacagttcagtggcagggctcaggatttcgtgggtctgttttcctttctcaccgcagtcgtcgcacagtctctctctctctctcccctcaaagtctgcaactttaagcagctcttgctaatcagtgtctcacactggcgtagaagtttttgtactgtaaagagacctacctcaggttgctggttgctgtgtggtttggtgtgttcccgcaaaccccctttgtgctgtggggctggtagctcaggtgggcgtggtcactgctgtcatcaattgaatggtcagcgttgcatgtcgtgaccaactagacattctgtcgccttagcatgtttgctgaacaccttgtggaagcaaaaatctgaaaatgtgaataaaattattttggattttgtaaaaaaaaaa

SEQ ID NO: 1033 - DNA, 1281 bp, Homo sapiens
  modified_base (814)..(814): a, c, t or g
  modified_base (832)..(832): a, c, t or g
  modified_base (870)..(870): a, c, t or g
  modified_base (889)..(889): a, c, t or g
  modified_base (892)..(892): a, c, t or g
  modified_base (905)..(905): a, c, t or g
  modified_base (911)..(911): a, c, t or g
  modified_base (913)..(913): a, c, t or g
  modified_base (916)..(916): a, c, t or g
  modified_base (921)..(921): a, c, t or g
  modified_base (953)..(953): a, c, t or g
  modified_base (955)..(955): a, c, t or g
  modified_base (966)..(966): a, c, t or g
  modified_base (971)..(991): a, c, t or g
  modified_base (994)..(994): a, c, t or g
  modified_base (996)..(996): a, c, t or g
  modified_base (998)..(1005): a, c, t or g
  modified_base (1008)..(1008): a, c, t or g
  modified_base (1021)..(1023): a, c, t or g
  modified_base (1026)..(1026): a, c, t or g
  modified_base (1031)..(1031): a, c, t or g
  modified_base (1034)..(1035): a, c, t or g
  modified_base (1043)..(1043): a, c, t or g
  modified_base (1050)..(1050): a, c, t or g
  modified_base (1057)..(1058): a, c, t or g
  modified_base (1060)..(1061): a, c, t or g
  modified_base (1063)..(1063): a, c, t or g
  modified_base (1066)..(1066): a, c, t or g
  modified_base (1068)..(1068): a, c, t or g
  modified_base (1071)..(1072): a, c, t or g
  modified_base (1082)..(1082): a, c, t or g
  modified_base (1085)..(1085): a, c, t or g
  modified_base (1090)..(1156): a, c, t or g
  modified_base (1170)..(1171): a, c, t or g
  modified_base (1179)..(1199): a, c, t or g
  modified_base (1201)..(1241): a, c, t or g
  modified_base (1243)..(1281): a, c, t or g
gatcgaattatacgactcactatagggaatttggccctcgaggccaacgaattcggcacgaggtggacatgagggtccccgctcagctcctggggctcctgctactctggctccgaggtgccagatgtgacatccagatgacccagtctccatcctccctgtctgcatctgtgggagacagagtcaccatcacttgccgggcaagtgagaccattcacaactatttaaattggtatcaacaaaaaccagggaaagcccctgaactcctaatctatggtgcgtccgaattacagagtggggtcccatcaagattcagcggcagtggatctggcacagatttcactctcaccatcaccagtctgcaacctgaagattttgcaacttattactgtcaccagagttacagtactctctacacttttggccaggggaccaggctggagatcaaacgaactgtggctgcaccatctgtcttcatcttcccgccatctgatgagcagttgaaatctggaactgcctctgttgtgtgcctgctgaataacttctatcccagagaggccaaagtacagtggaaggtggataacgccctccaatcgggtaactcccaggagagtgtcacagagcaggacagcaaggacagcacctacagcctcagcagcaccctgacgctgagcaaagcagactacgagaaacacaaagtctacgcctgcgaagtcacccatcagggcctgagctcgcccgtcacaaagagcttcaacaggggagagtgttagagggagaagtgcccccacctgctcctcagttccagcctgancccctcccatcctttggnctctgaccctttttccacaggggacctacccctattgnggtctccagctcatctttnacntcaccccccttcntcctcntnggntttanttatgctaatgttggaggagaatgaattaatnangtgaatcttgncaaannnnnnnnnnnnnnnnnnnnnaancngnnnnnnnnggngggggggggggcnnnccnccccnctnngggggggnttttttnggggggnngnngnggncnttnnaaaggggttntanccccnnnnnnnnnnnnnnnnnnnnnnnnnnnnnnnnnnnnnnnnnnnnnnnnnnnnnnnnnnnnnnnnnnnaaaaaaaaaaaaanngggggggnnnnnnnnnnnnnnnnnnnnngnnnnnnnnnnnnnnnnnnnnnnnnnnnnnnnnnnnnnnnnnannnnnnnnnnnnnnnnnnnnnnnnnnnnnnnnnnnnnnn

SEQ ID NO: 1034 - DNA, 1215 bp, Homo sapiens
  modified_base (53)..(53): a, c, t or g
  modified_base (72)..(72): a, c, t or g
  modified_base (95)..(95): a, c, t or g
  modified_base (104)..(104): a, c, t or g
  modified_base (106)..(106): a, c, t or g
  modified_base (123)..(123): a, c, t or g
  modified_base (136)..(136): a, c, t or g
  modified_base (172)..(172): a, c, t or g
  modified_base (187)..(187): a, c, t or g
  modified_base (189)..(189): a, c, t or g
  modified_base (198)..(198): a, c, t or g
  modified_base (391)..(391): a, c, t or g
  modified_base (394)..(394): a, c, t or g
  modified_base (398)..(398): a, c, t or g
  modified_base (401)..(401): a, c, t or g
  modified_base (409)..(409): a, c, t or g
  modified_base (412)..(412): a, c, t or g
  modified_base (421)..(421): a, c, t or g
  modified_base (424)..(425): a, c, t or g
  modified_base (427)..(428): a, c, t or g
  modified_base (433)..(434): a, c, t or g
  modified_base (440)..(441): a, c, t or g
  modified_base (444)..(446): a, c, t or g
  modified_base (453)..(453): a, c, t or g
  modified_base (466)..(466): a, c, t or g
  modified_base (468)..(468): a, c, t or g
  modified_base (470)..(470): a, c, t or g
  modified_base (478)..(478): a, c, t or g
  modified_base (482)..(482): a, c, t or g
  modified_base (487)..(487): a, c, t or g
  modified_base (490)..(490): a, c, t or g
  modified_base (495)..(495): a, c, t or g
  modified_base (499)..(499): a, c, t or g
  modified_base (505)..(505): a, c, t or g
  modified_base (507)..(507): a, c, t or g
  modified_base (512)..(512): a, c, t or g
  modified_base (523)..(523): a, c, t or g
  modified_base (525)..(525): a, c, t or g
  modified_base (527)..(527): a, c, t or g
  modified_base (529)..(530): a, c, t or g
  modified_base (544)..(544): a, c, t or g
  modified_base (546)..(546): a, c, t or g
  modified_base (552)..(552): a, c, t or g
  modified_base (555)..(555): a, c, t or g
  modified_base (557)..(557): a, c, t or g
  modified_base (567)..(567): a, c, t or g
  modified_base (569)..(570): a, c, t or g
  modified_base (572)..(572): a, c, t or g
  modified_base (577)..(577): a, c, t or g
  modified_base (584)..(585): a, c, t or g
  modified_base (588)..(588): a, c, t or g
  modified_base (591)..(591): a, c, t or g
  modified_base (600)..(601): a, c, t or g
  modified_base (608)..(608): a, c, t or g
  modified_base (611)..(611): a, c, t or g
  modified_base (615)..(615): a, c, t or g
  modified_base (622)..(622): a, c, t or g
  modified_base (624)..(624): a, c, t or g
  modified_base (628)..(628): a, c, t or g
  modified_base (630)..(630): a, c, t or g
  modified_base (652)..(652): a, c, t or g
  modified_base (659)..(661): a, c, t or g
  modified_base (663)..(663): a, c, t or g
  modified_base (666)..(667): a, c, t or g
  modified_base (671)..(671): a, c, t or g
  modified_base (678)..(678): a, c, t or g
  modified_base (686)..(686): a, c, t or g
  modified_base (688)..(689): a, c, t or g
  modified_base (693)..(694): a, c, t or g
  modified_base (698)..(698): a, c, t or g
  modified_base (701)..(702): a, c, t or g
  modified_base (707)..(707): a, c, t or g
  modified_base (709)..(711): a, c, t or g
  modified_base (718)..(719): a, c, t or g
  modified_base (722)..(724): a, c, t or g
  modified_base (728)..(730): a, c, t or g
  modified_base (736)..(736): a, c, t or g
  modified_base (738)..(738): a, c, t or g
  modified_base (753)..(1215): a, c, t or g
ttatacgactcactatagggaatttggccctcgaggcccagaattcggcacgngggaagttttagaataaangtaatatatttactataattctnaatgtttanangctttcctaaaaatgcnaaactatgatgtncagttgctcttattttacctctatgtgattatgggncttaattgttatttncnataatcatnatttttctgaaccattcttctggcctcagaagtaggactgaattctactattgctaggtgtgagaaagtggtggtgagaaccttagagcagtggagatttgctacctggtctgtgttttgagaagtgccccttagaaagttaaaagaatgtagaaaagatactcagtcttaatcctatgcaaaaaaaaaaaancangtanttntttccctntgnggaaaatanccnngnncggtnncaggcnnctnnnctttaangtaaattttcctnangncccccctntaangagtnttnaaaancatntttaantntaaanctttccaggcnancntnnttttccaaaacatncntggaanttnancccaaatggncnncntttanggttttnnttngantggtaaaanntttaaangtntgantaaaatntntttntnggtaaaaaaaaaaaaaaaaaanggggggnnngnggnntttnccccttngggggggntnntttnngggnggnncgggncnnngtttaannacnnngggnnngggaancngggggggaaaaaaannnnnnnnnnnnnnnnnnnnnnnnnnnnnnnnnnnnnnnnnnnnnnnnnnnnnnnnnnnnnnnnnnnnnnnnnnnnnnnnnnnnnnnnnnnnnnnnnnnnnnnnnnnnnnnnnnnnnnnnnnnnnnnnnnnnnnnnnnnnnnnnnnnnnnnnnnnnnnnnnnnnnnnnnnnnnnnnnnnnnnnnnnnnnnnnnnnnnnnnnnnnnnnnnnnnnnnnnnnnnnnnnnnnnnnnnnnnnnnnnnnnnnnnnnnnnnnnnnnnnnnnnnnnnnnnnnnnnnnnnnnnnnnnnnnnnnnnnnnnnnnnnnnnnnnnnnnnnnnnnnnnnnnnnnnnnnnnnnnnnnnnnnnnnnnnnnnnnnnnnnnnnnnnnnnnnnnnnnnnnnnnnnnnnnnnnnnnnnnnnnnnnnnnnnnnnnnnnnnnnnnnnnnnnnnnnnnnnnnnnnnnnnnnnnnnnnnnnnnnnnn

SEQ ID NO: 1035 - DNA, 6857 bp, Homo sapiens
gccccctccgagctccccgactcctccccgcgctccacggctcttcccgactccagtcagcgttcctcgggccctcggcgccacaagctgtccgggcacgcagcccctagcggcgcgtcgctgccaagccggcctccgcgcgcctccctccttccttctcccctggctgttcgcgatccagcttgggtaggcggggaagcagctggagtgcgaccgccacggcagccaccctgcaaccgccagtcggaggtgcagtccgtaggccctggcccccgggtgggcccttggggagtcggcgccgctcccgaggagctgcaaggctcgcccctgcccggcgtggagggcgcggggggcgcggaggatattcttggtgatcttggaagtgtccgtatcatggaatcaatctctatgatgggaagccctaagagccttagtgaaactgttttacctaatggcataaatggtatcaaagatgcaaggaaggtcactgtaggtgtgattggaagtggagattttgccaaatccttgaccattcgacttattagatgcggctatcatgtggtcataggaagtagaaatcctaagtttgcttctgaattttttcctcatgtggtagatgtcactcatcatgaagatgctctcacaaaaacaaatataatatttgttgctatacacagagaacattatacctccctgtgggacctgagacatctgcttgtgggtaaaatcctgattgatgtgagcaataacatgaggataaaccagtacccagaatccaatgctgaatatttggcttcattattcccagattctttgattgtcaaaggatttaatgttgtctcagcttgggcacttcagttaggacctaaggatgccagccggcaggtttatatatgcagcaacaatattcaagcgcgacaacaggttattgaacttgcccgccagttgaatttcattcccattgacttgggatccttatcatcagccagagagattgaaaatttacccctacgactctttactctctggagagggccagtggtggtagctataagcttggccacattttttttcctttattcctttgtcagagatgtgattcatccatatgctagaaaccaacagagtgacttttacaaaattcctatagagattgtgaataaaaccttacctatagttgccattactttgctctccctagtataccttgcaggtcttctggcagctgcttatcaactttattacggcaccaagtataggagatttccaccttggttggaaacctggttacagtgtagaaaacagcttggattactaagttttttcttcgctatggtccatgttgcctacagcctctgcttaccgatgagaaggtcagagagatatttgtttctcaacatggcttatcagcaggttcatgcaaatattgaaaactcttggaatgaggaagaagtttggagaattgaaatgtatatctcctttggcataatgagccttggcttactttccctcctggcagtcacttctatcccttcagtgagcaatgctttaaactggagagaattcagttttattcagtctacacttggatatgtcgctctgctcataagtactttccatgttttaatttatggatggaaacgagcttttgaggaagagtactacagattttatacaccaccaaactttgttcttgctcttgttttgccctcaattgtaattctgggtaagattattttattccttccatgtataagccaaaagctaaaacgaattaaaaaaggctgggaaaagagccaatttctggaagaaggtattggaggaacaattcctcatgtctccccggagagggtcacagtaatgtgatgataaatggtgttcacagctgccatataaagttctactcatgccattatttttatgacttctacgttcagttacaagtatgctgtcaaattatcgtgggttgaaacttgttaaatgagatttcaactgacttagtgatagagttttcttcaagttaattttcacaaatgtcatgtttgccaatatgaatttttctagtcaacatattattgtaatttaggtatgttttgttttgttttgcacaactgtaaccctgttgttactttatatttcataatcaggcaaaaatacttacagttaataatatagatataatgttaaaaacaatttgcaaaccagcagaattttaagcttttaaaataattcaatggatatacatttttttctgaagattaagattttaattattcaacttaaaaagtagaaatgcattattatacatttttttaagaaaggacacgttatgttagcatctaggtaaggctgcatgatagcattcctatatttctctcataaaataggatttgaaggatgaaattaattgtatgaagcaatgtgattatatgaagagacacaaattaaaaagacaaattaaacctgaaattatatttaaaatatatttgagacatgaaatacatactgataatacatacctcatgaaagattttattctttattgtgttacagagcagtttcattttcatattaatatactgatcaggaagaggattcagtaacatttggcctccaaaactgctatctctaatacggtaccaatcctaggaactgtatactagttcctacttagaacaaaagtatcaagtttgcacacaagtaatctgccagctgacctttgtcgcaccttaaccagtcaccacttgctatggtataggattatactgatgttctttgagggattctgatgtgctaggcatggttctaagtactttacttgtattatcccatttaatacttagaacaaccccgtgagataagtagttattatcctcattttacacatgagggaccgaaggatagaaaagttatttttcaaaggtcatgcagttaataaatggcagagtgagcattcaagtccaggtagtcatattccagaggccacggttttaaccactaggctctagagctcccgccgcgcccctatgcattatgttcacaatgccaatctagatgcttcctcttttgtataaagtcactgacattctttagagtgggttgggtgcatccaaaaatgtataaaaatattattataataaacttattactgcttgtagggtaattcacagttacttaccctattcttgcttggaacatgagcctggagacccatggcagtccatatgcctccctatgcagtgaagggccctagcagtgttaacaaattgctgagatcccacggagtctttcaaaaatctctgtagagttagtcttctccttttctcttcctgagaagttctcctgcctgcataaccattcattagggagtactttacaagcatgaaggatattagggtaagtggctaattataaatctactctagagacatataatcatacagattattcataaaatttttcagtgctgtccttccacatttaattgcattttgctcaaactgtagaatgccctacattccccccaccccaatttgctatttccttattaaaatagaaaattataggcaagatacaattatatgcgttcctcttcctgaaattataacatttctaaacttacccacgtaggtactactgaatccaactgccaacaataaaaagacttttatttagtagaggctacctttcccaccagtgactctttttctacaactgccttgtcagtttggtaattcacttatgattttctaatgttctcttggtgaattttattatcttgtaccctctttttttttttttttttttttaaagacagagtcttgctctgtcacccaggctggagtgcagtggcacgatctcggctcactgcaagctctgcctcccgggttcacgccattctcctgcctcagcctcccgagtagctgggactacaggtgcccgccaccatgcccggctgatttctttttgtatttttagtagagacggagtttcaccgtgttagccaggatggtctcgatctcctgacctcgtgatccgcccgccttggcctccaaagtgctgggattacaggtgtgagctaccgcgcccggcctattatcttgtactttctaactgagccctctattttctttattttaataatatttctccctacttgagaatcacttgttagttcttggtaggaattcagttgggcaatgataacttttatgggcaaaaacattctattatagtgaacaaatgaaaataacagcgtattttcaatattttcttattccttaaattccactcttttaacactatgcttaaccacttaatgtgatgaaatattcctaaaagttaaatgactattaaagcatatattgttgcatgtatatattaagtagccgatactctaaataaaaataccactgttacagataaatggggcctttaaaaatatgaaaaacaaacttgtgaaaatgtataaaagatgcatctgttgtttcaaatggcactatcttcttttcagtactacaaaaacagaataattttgaagttttagaataaatgtaatatatttactataattctaaatgtttaaatgcttttctaaaaatgcaaaactatgatgtttagttgctttattttacctctatgtgattatttttcttaattgttattttttataatcattatttttctgaaccattcttctggcctcagaagtaggactgaattctactattgctaggtgtgagaaagtggtggtgagaaccttagagcagtggagatttgctacctggtctgtgttttgagaagtgccccttagaaagttaaaagaatgtagaaaagatactcagtcttaatcctatgcaaaaaaaaaaatcaagtaattgttttcctatgaggaaaataaccatgagctgtatcatgctacttagcttttatgtaaatatttcttatgtctcctctattaagagtatttaaaatcatatttaaatatgaatctattcatgctaacattatttttcaaaacatacatggaaatttagcccagattgtctacatataaggtttttatttgaattgtaaaatatttaaaagtatgaataaaatatatttataggtatttatcagagatgattattttgtgctacatacaggttggctaatgagctctagtgttaaactacctgattaatttcttataaagcagcataaccttggcttgattaaggaattctactttcaaaaattaatctgataatagtaacaaggtatattatactttcattacaatcaaattatagaaattacttgtgtaaaagggcttcaagaatatatccaatttttaaatattttaatatatctcctatctgataacttaattcttctaaattaccacttgccattaagctatttcataataaattctgtacagtttccccccaaaaaagagatttatttatgaaatatttaaagtttctaatgtggtattttaaataaagtatcataaatgtaataagtaaatatttatttaggaatactgtgaacactgaactaattattcctgtgtcagtctatgaaatccctgttttgaaatacgtaaacagcctaaaatgtgttgaaattattttgtaaatccatgacttaaaacaagatacatacatagtataacacacctcacagtgttaagatttatattgtgaaatgagacaccctaccttcaattgttcatcagtgggtaaaacaaattctgatgtacattcaggacaaatgattagccctaaatgaaactgtaataatttcagtggaaactcaatctgtttttacctttaaacagtgaattttacatgaatgaatgggttcttcactttttttttagtatgagaaaattatacagtgcttaattttcagagattctttccatatgttactaaaaaatgttttgttcagcctaacatactgagttttttttaactttctaaattattgaatttccatcatgcattcatccaaaattaaggcagactgtttggattcttccagtggccagatgagctaaattaaatcacaaaagcagatgcttttgtatgatctccaaattgccaactttaaggaaatattctcttgaaattgtctttaaagatcttttgcagctttgcagatacccagactgagctggaactggaatttgtcttcctattgactctacttctttaaaagcggctgcccattacattcctcagctgtccttgcagttaggtgtacatgtgactgagtgttggccagtgagatgaagtctcctcaaaggaaggcagcatgtgtcctttttcatcccttcatcttgctgctgggattgtggatataacaggagccctggcagctgtctccagaggatcaaagccacacccaaagagtaaggcagattagagaccagaaagaccttgactacttccctacttccactgctttttcctgcatttaagccattgtaaatctgggtgtgttacatgaagtgaaaattaattctttctgcccttcagttctttatcctgataccatttaacactgtctgaattaactagactgcaataattctttcttttgaaagcttttaaaggataatgtgcaattcacattaaaattgattttccattgtcaattagttatactcattttcctgccttgatctttcattagatattttgtatctgcttggaatatattatcttctttttaactgtgtaattggtaattactaaaactctgtaatctccaaaatattgctatcaaattacacaccatgttttctatcattctcatagatctgccttataaacatttaaataaaaagtactatttaatgattt

SEQ ID NO: 1036 - DNA, 1344 bp, Homo sapiens
  modified_base (4)..(4): a, c, t or g
  modified_base (102)..(102): a, c, t or g
  modified_base (660)..(660): a, c, t or g
  modified_base (662)..(662): a, c, t or g
  modified_base (664)..(664): a, c, t or g
  modified_base (666)..(667): a, c, t or g
  modified_base (679)..(679): a, c, t or g
  modified_base (695)..(698): a, c, t or g
  modified_base (703)..(703): a, c, t or g
  modified_base (705)..(705): a, c, t or g
  modified_base (722)..(723): a, c, t or g
  modified_base (726)..(728): a, c, t or g
  modified_base (730)..(732): a, c, t or g
  modified_base (740)..(740): a, c, t or g
  modified_base (743)..(744): a, c, t or g
  modified_base (748)..(749): a, c, t or g
  modified_base (755)..(1344): a, c, t or g
gatngaattatacgactcacttatagggaattttggccctcgaggccaagaattcggcacgaggcctaagcagacatccttgttgccagatttggcccctgnaaagaagagatgccctcattcccaccaccaccccccctacccccagggactgggtactaccttactggcccttacaagagtggagggcagacacagatgttgtcagcatccttattcctgctccagatgcatctctgttcatgactgtgtgagctcctgtccttttcctggagaccctgtgtcgggctgttaaagagaatgagttaccaagaaggaatgacgtgcccctgcgaatcagggaccaacaggagagagctcttgagtgggctagtgactccccctgcagcctggtggagatggtgtgaggagcgaagagccctctgctctaggatttgggttgaaaaacagagagagaagtggggagttgccacaggagctaacacgctgggaggcagttgggggcgggtgaactttgtgtagccgaggccgcaccctccctcattccaggctcattcattttcatgctccattgccagactcttgctgggagcccgtccagaatgtcctcccaataaaactccatcctatgacgcaaaaaaaaaaaaaaaaaaggggggncngnanntttttccctttngggggggttaattttnnnntgggncngggcggttttttaaaannttnnngnnngaaaaccnggnntttnnaaaaannnnnnnnnnnnnnnnnnnnnnnnnnnnnnnnnnnnnnnnnnnnnnnnnnnnnnnnnnnnnnnnnnnnnnnnnnnnnnnnnnnnnnnnnnnnnnnnnnnnnnnnnnnnnnnnnnnnnnnnnnnnnnnnnnnnnnnnnnnnnnnnnnnnnnnnnnnnnnnnnnnnnnnnnnnnnnnnnnnnnnnnnnnnnnnnnnnnnnnnnnnnnnnnnnnnnnnnnnnnnnnnnnnnnnnnnnnnnnnnnnnnnnnnnnnnnnnnnnnnnnnnnnnnnnnnnnnnnnnnnnnnnnnnnnnnnnnnnnnnnnnnnnnnnnnnnnnnnnnnnnnnnnnnnnnnnnnnnnnnnnnnnnnnnnnnnnnnnnnnnnnnnnnnnnnnnnnnnnnnnnnnnnnnnnnnnnnnnnnnnnnnnnnnnnnnnnnnnnnnnnnnnnnnnnnnnnnnnnnnnnnnnnnnnnnnnnnnnnnnnnnnnnnnnnnnnnnnnnnnnnnnnnnnnnnnnnnnnnnnnnnnnnnnnnnnnnnnnnnnnnnnnnnnnnnnnnnnnnnnnnnnnnnnnnnnnnnnnnnnnnnnnnnnnnnnnnnnnnnnnnnnnnnnnn

SEQ ID NO: 1037 - DNA, 5130 bp, Homo sapiens
atgggcttcttgcccaagcttctcctcctggcctcattcttcccagcaggccaggcctcatggggcgtctccagtccccaggacgtgcagggtgtgaaggggtcttgcctgcttatcccctgcatcttcagcttccctgccgacgtggaggtgcccgacggcatcacggccatctggtactacgactactcgggccagcggcaggtggtgagccactcggcggaccccaagctggtggaggcccgcttccgcggccgcaccgagttcatggggaaccccgagcacagggtgtgcaacctgctgctgaaggacctgcagcccgaggactctggttcctacaacttccgcttcgagatcagtgaggtcaaccgctggtcagatgtgaaaggcaccttggtcacagtaacagaggagcccagggtgcccaccattgcctccccggtggagcttctcgagggcacagaggtggacttcaactgctccactccctacgtatgcctgcaggagcaggtcagactgcagtggcaaggccaggaccctgctcgctctgtcaccttcaacagccagaagtttgagcccaccggcgtcggccacctggagaccctccacatggccatgtcctggcaggaccacggccggatcctgcgctgccagctctccgtggccaatcacagggctcagagcgagattcacctccaagtgaagtatgcccccaagggtgtgaagatcctcctcagcccctcggggaggaacatccttccaggtgagctggtcacactcacctgccaggtgaacagcagctaccctgcagtcagttccattaagtggctcaaggatggggtacgcctccaaaccaagactggtgtgctgcacctgccccaggcagcctggagcgatgctggcgtctacacctgccaagctgagaacggcgtgggctctttggtctcaccccccatcagcctccacatcttcatggctgaggtccaggtgagcccagcaggtcccatcctggagaaccagacagtgacactagtctgcaacacacccaatgaggcacccagtgatctccgctacagctggtacaagaaccatgtcctgctggaggatgcccactcccataccctccggctgcacttggccactagggctgatactggcttctacttctgtgaggtgcagaacgtccatggcagcgagcgctcgggccctgtcagcgtggtagtcaaccacccgcctctcactccagtcctgacagccttcctggagacccaggcgggacttgtgggcatccttcactgctctgtggtcagtgagcccctggccacactggtgctgtcacatgggggtcatatcctggcctccacctccggggacagtgatcacagcccacgcttcagtggtacctctggtcccaactccctgcgcctggagatccgagacctggaggaaactgacagtggggagtacaagtgctcagccaccaactcccttggaaatgcaacctccaccctggacttccatgccaatgccgcccgtctcctcatcagcccggcagccgaggtggtggaaggacaggcagtgacactgagctgcagaagcggcctaagccccacacctgatgcccgcttctcctggtacctgaatggagccctgcttcacgagggtcccggcagcagcctcctgctccccgcggcctccagcactgacgccggctcataccactgccgggcccgggacggccacagtgccagtggcccctcttcgccagctgttctcactgtgctctacccccctcgacaaccaacattcaccaccaggctggaccttgatgccgctggggccggggctggacggcgaggcctccttttgtgccgtgtggacagcgacccccccgccaggctgcagctgctccacaaggaccgtgttgtggccacttccctgccatcagggggtggctgcagcacctgtgggggctgttccccacgcatgaaggtcaccaaagcccccaacttgctgcgtgtggagattcacaaccctttgctggaagaggagggcttgtacctctgtgaggccagcaatgccctgggcaacgcctccacctcagccaccttcaatggccaggccactgtcctggccattgcaccatcacacacacttcaggagggcacagaagccaacttgacttgcaacgtgagccgggaagctgctggcagccctgctaacttctcctggttccgaaatggggtgctgtgggcccagggtcccctggagaccgtgacactgctgcccgtggccagaactgatgctgccctttacgcctgccgcatcctgactgaggctggtgcccagctctccactcccgtgctcctgagtgtactctatcccccggaccgtccaaagctgtcagccctcctagacatgggccagggccacatggctctgttcatctgcactgtggacagccgccccctggccttgctggccttgttccatggggagcacctcctggccaccagcctgggtccccaggtcccatcccatggtcggttccaggctaaagctgaggccaactccctgaagttagaggtccgagaactgggccttggggactctggcagctaccgctgtgaggccacaaatgttcttggatcatccaacacctcactcttcttccaggtccgaggagcctgggtccaggtgtcaccatcacctgagctccaagagggccaggctgtggtcctgagctgccaggtacacacaggagtcccagaggggacctcatatcgttggtatcgggatggccagcccctccaggagtcgacctcggccacgctccgctttgcagccataactttgacacaagctggggcctatcattgccaagcccaggccccaggctcagccaccacgagcctagctgcacccatcagcctccacgtgtcctatgccccacgccacgtcacactcactaccctgatggacacaggccctggacgactgggcctcctcctgtgccgtgtggacagtgaccctccggcccagctgcggctgctccacggggatcgccttgtggcctccaccctacaaggtgtggggggacccgaaggcagctctcccaggctgcatgtggctgtggcccccaacacactgcgtctggagatccacggggctatgctggaggatgagggtgtctatatctgtgaggcctccaacaccctgggccaggcctcggcctcagctgacttcgacgctcaagctgtgaatgtgcaggtgtggcccggggctaccgtgcgggaggggcagctggtgaacctgacctgccttgtgtggaccactcacccggcccagctcacctacacatggtaccaggatgggcagcagcgcctggatgcccactccatccccctgcccaacgtcacagtcagggatgccacctcctaccgctgcggtgtgggcccccctggtcgggcaccccgcctctccagacctatcaccttggacgtcctctacgcgccccgcaacctgcgcctgacctacctcctggagagccatggcgggcagctggccctggtactgtgcactgtggacagccgcccgcccgcccagctggccctcagccacgccggtcgcctcttggcctcctcgacagcagcctctgtccccaacaccctgcgcctggagctgcgagggccacagcccagggatgagggtttctacagctgctctgcccgcagccctctgggccaggccaacacgtccctggagctgcggctggagggtgtgcgggtgatcctggctccggaggctgccgtgcctgaaggtgcccccatcacagtgacctgtgcggaccctgctgcccacgcacccacactctatacttggtaccacaacggtcgttggctgcaggagggtccagctgcctcactctcattcctggtggccacgcgggctcatgcaggcgcctactcttgccaggcccaggatgcccagggcacccgcagctcccgtcctgctgccctgcaagtcctctatgcccctcaggacgctgtcctgtcctccttccgggactccagggccagatccatggctgtgatacagtgcactgtggacagtgagccacctgctgagctggccctatctcatgatggcaaggtgctggccacgagcagcggggtccacagcttggcatcagggacaggccatgtccaggtggcccgaaacgccctacggctgcaggtgcaagatgtgcctgcaggtgatgacacctatgtttgcacagcccaaaacttgctgggctcaatcagcaccatcgggcggttgcaggtagaaggtgcacgcgtggtggcagagcctggcctggacgtgcctgagggcgctgccctgaacctcagctgccgcctcctgggtggccctgggcctgtgggcaactccacctttgcatggttctggaatgaccggcggctgcacgcggagcctgtgcccactctcgccttcacccacgtggctcgtgctcaagctgggatgtaccactgcctggctgagctccccactggggctgctgcctctgctccagtcatgctccgtgtgctctaccctcccaagacgcccaccatgatggtcttcgtggagcctgagggtggcctccggggcatcctggattgccgagtggacagcgagccgctcgccagcctgactctccaccttggcagtcgactggtggcctccagtcagccccagggtgctcctgcagagccacacatccatgtcctggcttcccccaatgccctgagggtggacatcgaggcgctgaggcccagcgaccaaggggaatacatctgttctgcctcaaatgtcctgggctctgcctctacctccacctactttggggtcagagccctgcaccgcctgcatcagttccagcagctgctctgggtcctgggactgctggtgggcctcctgctcctgctgttgggcctgggggcctgctacacctggagaaggaggcgtgtttgtaagcagagcatgggcgagaattcggtggagatggcttttcagaaagagaccacgcagctcattgatcctgatgcagccacatgtgagacctcaacctgtgccccacccctgggctga

SEQ ID NO: 1038 - DNA, 758 bp, Homo sapiens
  modified_base (4)..(4): a, c, t or g
tttncacaggaaacagctatgacatgattacgaatttaatacgactcactatagggaatttggccctcgaggccaagaattcggcacgagcctgctttcaaacgggtctggaattatttccaaagggtattggtgaagaaatatgcttcggaaagaaatggagttaacgtgataagtggaccaatcttcgactatgactatgatggcttacatgacacagaagacaaaataaaacagtacgtggaaggcagttccattcctgttccaactcactactacagcatcatcaccagctgtctggattttactcagcctgccgacaagtgtgacggccctctctctgtgtcctccttcatcctgcctcaccggcctgacaacgaggagagctgcaatagctcagaggacgaatcaaaatgggtagaagaactcatgaagatgcacacagctagggtgcgtgacattgaacatctcaccagcctggacttcttccgaaagaccagccgcagctacccagaaatcctgacactcaagacatacctgcatacatatgagagcgagatttaactttctgagcatctgcagtacagtcttatcaactggttgtatatttttatattggttttgtatttattaatttgaaaccaggacattaaaaatgttagtattttaatcctgtaccaaatctgacatattatgcctgaatgactccactgtttttctctaatgcttgatttaggtagccttgtgttctgagtaga

SEQ ID NO: 1039 - DNA, 3231 bp, Homo sapiens
cgtgaaggcaaagagaacacgctgcaaaaggcttccaagaatcctcgacatggcaaggaggagctcgttccagtcgtgtcagataatatccctgttcacttttgccgttggagtcagtatctgcttaggattcactgcacatcgaattaagagagcagaaggatgggaggaaggtcctcctacagtgctatcagactccccctggaccaacatctccggatcttgcaagggcaggtgctttgaacttcaagaggctggacctcctgattgtcgctgtgacaacttgtgtaagagctataccagttgctgccatgactttgatgagctgtgtttgaagacagcccgtggctgggagtgtactaaggacagatgtggagaagtcagaaatgaagaaaatgcctgtcactgctcagaggactgcttggccaggggagactgctgtaccaattaccaagtggtttgcaaaggagagtcgcattgggttgatgatgactgtgaggaaataaaggccgcagaatgccctgcagggtttgttcgccctccattaatcatcttctccgtggatggcttccgtgcatcatacatgaagaaaggcagcaaagtcatgcctaatattgaaaaactaaggtcttgtggcacacactctccctacatgaggccggtgtacccaactaaaacctttcctaacttatacactttggccactgggctatatccagaatcacatggaattgttggcaattcaatgtatgatcctgtatttgatgccacttttcatctgcgagggcgagagaaatttaatcatagatggtggggaggtcaaccgctatggattacagccaccaagcaaggggtgaaagctggaacattcttttggtctgttgtcatccctcacgagcggagaatattaaccatattgcggtggctcaccctgccagatcatgagaggccttcggtctatgccttctattctgagcaacctgatttctctggacacaaatatggccctttcggccctgaggagagtagttatggctcaccttttactccggctaagagacctaagaggaaagttgcccctaagaggagacaggaaagaccagttgctcctccaaagaaaagaagaagaaaaatacataggatggatcattatgctgcggaaactcgtcaggacaaaatgacaaatcctctgagggaaatcgacaaaattgtggggcaattaatggatggactgaaacaactaaaactgcgtcggtgtgtcaacgtcatctttgtcggagaccatggaatggaagatgtcacatgtgatagaactgagttcttgagtaattacctaactaatgtggatgatattactttagtgcctggaactctaggaagaattcgatccaaatttagcaacaatgctaaatatgaccccaaagccattattgccaatctcacgtgtaaaaaaccagatcagcactttaagccttacttgaaacagcaccttcccaaacgtttgcactatgccaacaacagaagaattgaggatatccatttattggtggaacgcagatggcatgttgcaaggaaacctttggatgtttataagaaaccatcaggaaaatgctttttccagggagaccacggatttgataacaaggtcaacagcatgcagactgtttttgtaggttatggcccaacatttaagtacaagactaaagtgcctccatttgaaaacattgaactttacaatgttatgtgtgatctcctgggattgaagccagctcctaataatgggacccatggaagtttgaatcatctcctgcgcactaataccttcaggccaaccatgccagaggaagttaccagacccaattatccagggattatgtaccttcagtctgattttgacctgggctgcacttgtgatgataaggtagagccaaagaacaagttggatgaactcaacaaacggcttcatacaaaagggtctacagaagagagacacctcctctatgggcgacctgcagtgctttatcggactagatatgatatcttatatcacactgactttgaaagtggttatagtgaaatattcctaatgctactctggacatcatatactgtttccaaacaggctgaggtttccagcgttcctgaccatctgaccagttgcgtccggcctgatgtccgtgtttctccgagtttcagtcagaactgtttggcctacaaaaatgataagcagatgtcctacggattcctctttcctccttatctgagctcttcaccagaggctaaatatgatgcattccttgtaaccaatatggttccaatgtatcctgctttcaaacgggtctggaattatttccaaagggtattggtgaagaaatatgcttcggaaagaaatggagttaacgtgataagtggaccaatcttcgactatgactatgatggcttacatgacacagaagacaaaataaaacagtacgtggaaggcagttccattcctgttccaactcactactacagcatcatcaccagctgtctggatttcactcagcctgccgacaagtgtgacggccctctctctgtgtcctccttcatcctgcctcaccggcctgacaacgaggagagctgcaatagctcagaggacgaatcaaaatgggtagaagaactcatgaagatgcacacagctagggtgcgtgacattgaacatctcaccagcctggacttcttccgaaagaccagccgcagctacccagaaatcctgacactcaagacatacctgcatacatatgagagcgagatttaactttctgagcatctgcagtacagtcttatcaactggttgtatatttttatattgtttttgtatttattaatttgaaaccaggacattaaaaatgttagtattttaatcctgtaccaaatctgacatattatgcctgaatgactccactgtttttctctaatgcttgatttaggtagccttgtgttctgagtagagcttgtaataaatactgcagcttgagaaaaagtggaagcttctaaatggtgctgcagatttgatatttgcattgaggaaatattaattttccaatgcacagttgccacatttagtcctgtactgtatggaaacactgattttgtaaagttgcctttatttgctgttaactgttaactatgacagatatatttaagccttataaaccaatcttaaacataataaatcacacattcagtttt

SEQ ID NO: 1040 - DNA, 1088 bp, Homo sapiens
  modified_base (2)..(2): a, c, t or g
  modified_base (4)..(4): a, c, t or g
  modified_base (10)..(10): a, c, t or g
  modified_base (108)..(108): a, c, t or g
  modified_base (166)..(166): a, c, t or g
  modified_base (172)..(172): a, c, t or g
  modified_base (252)..(253): a, c, t or g
  modified_base (261)..(261): a, c, t or g
  modified_base (263)..(263): a, c, t or g
  modified_base (268)..(268): a, c, t or g
  modified_base (272)..(272): a, c, t or g
  modified_base (315)..(315): a, c, t or g
  modified_base (326)..(326): a, c, t or g
  modified_base (332)..(332): a, c, t or g
  modified_base (339)..(339): a, c, t or g
  modified_base (342)..(342): a, c, t or g
  modified_base (371)..(371): a, c, t or g
  modified_base (375)..(375): a, c, t or g
  modified_base (398)..(398): a, c, t or g
  modified_base (406)..(406): a, c, t or g
  modified_base (413)..(413): a, c, t or g
  modified_base (415)..(415): a, c, t or g
  modified_base (418)..(418): a, c, t or g
  modified_base (422)..(422): a, c, t or g
  modified_base (426)..(426): a, c, t or g
  modified_base (450)..(450): a, c, t or g
  modified_base (475)..(475): a, c, t or g
  modified_base (479)..(479): a, c, t or g
  modified_base (484)..(484): a, c, t or g
  modified_base (490)..(490): a, c, t or g
  modified_base (494)..(494): a, c, t or g
  modified_base (497)..(497): a, c, t or g
  modified_base (676)..(676): a, c, t or g
  modified_base (713)..(713): a, c, t or g
  modified_base (761)..(761): a, c, t or g
  modified_base (764)..(765): a, c, t or g
  modified_base (769)..(769): a, c, t or g
  modified_base (771)..(772): a, c, t or g
  modified_base (775)..(776): a, c, t or g
  modified_base (779)..(779): a, c, t or g
  modified_base (788)..(789): a, c, t or g
  modified_base (792)..(793): a, c, t or g
  modified_base (796)..(796): a, c, t or g
  modified_base (798)..(798): a, c, t or g
  modified_base (805)..(807): a, c, t or g
  modified_base (809)..(809): a, c, t or g
  modified_base (812)..(812): a, c, t or g
  modified_base (815)..(815): a, c, t or g
  modified_base (818)..(818): a, c, t or g
  modified_base (820)..(823): a, c, t or g
  modified_base (833)..(838): a, c, t or g
  modified_base (841)..(842): a, c, t or g
  modified_base (847)..(847): a, c, t or g
  modified_base (852)..(852): a, c, t or g
  modified_base (856)..(857): a, c, t or g
  modified_base (861)..(862): a, c, t or g
  modified_base (865)..(865): a, c, t or g
  modified_base (871)..(871): a, c, t or g
  modified_base (876)..(878): a, c, t or g
  modified_base (883)..(886): a, c, t or g
  modified_base (891)..(929): a, c, t or g
  modified_base (933)..(1088): a, c, t or g
antncgactnctatgggaatttggccctcgaggccaagaattcggcacgagggagcactgggattttgcctcccagccaaaatgctccagggctaggcagcaaagaanaaagagtgcgatatgagggtacagtgagtttggcagtccaaattcgtgttctctgcancctgtntttgagtagatttgtgaataaagtcacccgcctacttgtctaagcacatgtgggtgtgtaactcagttcctggttctcgnntctaaaancnaactnccanctgggaaactttttgggggaaattaactggacacctatctcgnaggtttatttncttgcnaccaatnaantcttcctcctcccttccctggataactcntcantttgactgacactgttctggtgncaactccngcgtcgncncangcanaagnacttcagctgctggtctcattggntccactgccattgatatgggggggngcanaggancactcnttgnccntgatggagatccaggacagactgggggactccgggaagaggctttcttggggaagaggaccccaaaggaggtacttcctcctcactgatgccctcagggctgctgtgtgggtgtgttaagctgataaagttcagtttgcggcggaaactacctgctagtcttgtgtcaggggctgccancctccttttgtttcactttttgcccccttcttgggancatttgaccaaaaataatcctcatttcaaaaaaaaaaaaaaaaaaacnttnngggncnnaannttnttccctttnnggnnggntnaattttnnntnggnccnggncnnnntttttaaaannnnnnggnnggggnaaaancccnngggnnttncccaanttaannnccccnnnnaaaannnnnnnnnnnnnnnnnnnnnnnnnnnnnnnnnnnnnnngggnnnnnnnnnnnnnnnnnnnnnnnnnnnnnnnnnnnnnnnnnnnnnnnnnnnnnnnnnnnnnnnnnnnnnnnnnnnnnnnnnnnnnnnnnnnnnnnnnnnnnnnnnnnnnnnnnnnnnnnnnnnnnnnnnnnnnnnnnnnnnnnnnnnnnnnnnnnn

SEQ ID NO: 1041 - DNA, 4505 bp, Homo sapiens
ggcaaagtgaaggcttcctgatctcagaagcacgttgtgggcttggaaaccgacggcagcctttagtcaattttggatcgctttgacttctccaacacggtttggcatctctgaaaccttgagaactgtgatgggcagtggaaagaagagggaaaggtgcccatggcgtccgagcggggcaaggtcaagcacaactggagcagcacgtcggaagggtgtccccgcaagcgcagctgcctccgggagccctgtgatgtggccccctccagccggccagctcagaggtctgcgtcgcgttctggagggcccagcagccccaagcgcctgaaagcccagaaggaggacgatgtggcttgctcgcggaggttatcctggggctcatcccgccgcagaaataactcctcctcctccttctccccacatttcttgggccctggtgtgggcggggccgcctccaaaggctgcctgattcggaacactcgggggttcctgtcttcagggggatcccctctgcgtcctgccaacgcctctttggaagaaatggcttctctagaggaggaagcctgcagccttaaggttgattccaaagatagttctcataactccacaaactctgaatttgcagctgaagctgagggtcagaatgatacaattgaggaacccaacaaggtccagaaaaggaagagggatagacttcgagaccagggctccacaatgatctacctgaaggctatccagggcatcctggggaaatcgatgccaaaaaggaagggagaggctgccactcgggcaaaaccaagcgcagcagagcatcccagccatggagaaggaccagccaggagtgaaggaccagccaagactgcagaaggagcagccaggagtgtcacagtcactgctgctcagaaggagaaagacgcaaccccagagatcagcatggaggaggataagacagtgccagagaggagcagcttctatgacaggagagtagttatagaccctcaagagaaacccagtgaggagccccttggggaccgaaggactgtcattgacaaatgctctccacccctagagttcttggatgactctgactctcatttagaaatccaaaagcataaagatagggaggtggtgatggagcacccctcttctggaagtgactggtctgatgttgaggagatctccacagtcagattctctcaggaggaacctgtctccctgaaaccttcagccgttccggagccttcttccttcaccaccgactatgtcatgtaccctcctcatttgtacagtagtccttggtgtgactacgccagctattggaccagcagccccaagccttctagctacccctccacaggcagcagcagcaacgatgcagcccaggttgggaagagcagccggagccgcatgagtgattattcccccaactctacagggagtgtccaaaacacctccagagacatggaggcctcagaggaaggctggtcccagaattctcgttcatttcgcttctccagaagctcagaagaaagagaggtgaaggagaaaagaacattccaagaggagatgcctccgcgtccttgtggaggacacgcatccagctccctgccaaagagccacctggagccaagcctagaggagggcttcattgacactcattgtcacctggacatgctctattccaagctatctttccaagggacctttacaaagttcagaaaaatttacagcagctccttccctaaggaatttcagggctgcatctctgacttctgtgatccccgcaccctgacagattgcctatgggaggagctgttgaaagaggatctggtctggggggcctttggctgtcaccctcattttgcacgttactacagtgagagtcaagaaagaaatcttttgcaagccttaaggcaccctaaggctgtggcatttggagaaatgggcttggattactcttacaagtgcaccacgcctgtcccagaacagcacaaggtatttgagagacagctgcagctggctgtgtctctaaagaagcccttggtgatccactgccgagaagctgatgaagatctgctagaaatcatgaaaaagtttgtgccccctgactacaagatccataggcattgcttcaccggcagctacccggtcattgagcccctgctgaagtactttcccaacatgtctgtgggcttcacggcagtgctgacatactcctctgcctgggaggcccgggaagccttgaggcagatcccactggagagaatcatcgtggaaacggatgctccctatttcctccctcgccaggttcccaaaagcctttgccagtatgcccacccgggcctggccttgcatacggtccgagagattgccagagtcaaagatcagccactctccctcaccttggctgccttgcgtgagaacaccagtcgcctctacagtctttaagcagagaaggtacagtcctcgggagtctcctagaaaagggcgaccagcagcctgacagaacacaggctggcttgaagtctgtgtctcaggtcgaggatgtgtttagagagctgattggaacacagaaaaccaggacaggatgttttcctccaagcgggtcataaggcttcagcttctgggtggtgggtggggtggggtgggcatggaatgaggggtatggggactgcctgtaatagcactgggattttgcctcccagccaaaatgctccagggtaggcagcaaagaagaaagagtgcgatatgagggtacagtgagtttggcagtccaaattctgttctctgcagcctgtttttgagtagttggtgaataaagtcacccgcctacttgtctaagcacatgtgggtgtgtaactcagttcctggttctcggttctaaaaacagacttccaactgggaaactttttgggggaaattaactggacacctatctcggaggtttattttcttgcaaccagtgaagtcgtcctcctcccttccctggataactcttcagtttgactgtcactgttctggtgtcaactccagcgtcggcacaggcagaaggacttcagctgctggtctcattggttccactgccattgatatgggggggtgcagaggagcactcattgtccatgatggagatccaggacagactgggggactccgggaagaggctttcttggggaagaggaccccaaaggaggtacttcctcctcactgatgccctcagggctgctgtgtgggtgtgttaagctgataaggttcagtttgcggcggaaactacctgctagtcttgtgtcaggggctgccagcctccttttgttttacttttgcccccttcttgggaacatttgaccaaaaataatcctcatttcatcttgtgtacagtcctttgtgtaccccgcccaggttgagaggtgaatcagcgtaattctccgaagctctgctgggcagctcagccatgttacattgtctatgcagaataagcaggcctggtgtctgcaaatgtaccagtccttctcccgcatctcctgggtgcccccttggctttgcctctcctgtgtcctgtctttctgcgttttagaagtgagagcctctccttcaccttttgagcaactgagtcatctcaagtcctgagctctgctctgccgcctgctggtgccttgtaaaggtatactcgttacaggccctagaggttctaatggtccagggttaagtgagaggagactgtactttgtttcaaaggatccttcaccctgatctgcagtgaggtggatagatcacctggagtccctcgtctgtggtcttggaggcttaaattgtaaaatacatcccttatggaatcctaaattcctctaggtgtttttggaaggcgcatttgagccttgtgagctaaaatggaatggatttaatatttcctatctggcatttccatcttgcccctggtacacaagtcactggcctggaactcagccttgattcactgtccgtcttcacggattagctgtgctgttatgttgtctgtgctgcagattggcccatgtgggaagtcgggggggacctgatttcctgcttggaagacttgggggactgccgagcatatcaaagtgtttatagtcaccaagtgaactgcagcacaaccatctcctctccagcaagccctgaagtcagtagtgcctgcaggtgaaaccaaccagccctgtgttagaggaggaaaagcggagatgacatggaagtctccaagcctgtgccatccacctgccaaggaaaagcacaaggtgctatctacttttctctctaggatttagattatcatttatgtgctgttgcacagtgaaacctcacctgtgtgggcgtgaaagctgattggcattgtttttgattcagctttttggatggctaattgttttcactgtgctgtgggaatgcctctgtattttttcccctctttggccatctttttctgaaaataaagtgatggatcctctagccaaaaaaaaaaaaaaaaaaaaaaa

SEQ ID NO: 1042 - DNA, 1736 bp, Homo sapiens
cttttccactcctccccttacctcccttctcttctgaattctccattctgggctcttgcctgtgaaatctttctttgctttccccatcttttcctcgcattttttcaccatctttccctcaatctccaggagccaatgcgagactttggctccgattaagcgacggcccgagactcggggtgcgcgaggaggatcgacagagtggtgatggagagcaccccttcaaggggactgaaccgagtacacctacaatgcaggaatctgcaggaattcttagggggcctgagccctggggtattggaccgattgtatgggcaccctgccacatgtctggctgtcttcagggagctcccatccttggctaagaactgggtgatgcggatgctctttctggagcagcctttgccacaggctgctgtagctctgtgggtaaagaaggaattcagcaaggctcaggaggaaagtacagggctgctgagcggcctccggatctggcacacacagctgctcccaggcgggctccagggcctcatcctcaaccccattttccgccagaacctccgcattgcccttctgggtggggggaaggcctggtctgatgacacaagtcagctgggaccagacaagcatgcccgggacgttccctcccttgacaagtacgccgaggagcgatgggaggtggtcttgcacttcatggtgggctcccccagtgcagctgtcagccaggacttggctcagctcctcagccaggctgggctcatgaagagtactgaacctggagagccgccctgcattacttccgctggcttccagttcctgttgctggacaccccggctcagctctggtactttatgttgcagtatttgcagacagcccagagccggggcatggacctggtagagattctctccttcctcttccagctcagcttctctactctgggcaaggattactctgtggaaggtatgagtgattctctgttgaacttcctgcaacatctgcgtgagtttgggcttgttttccagaggaagaggaaatctcggcgttactaccccacacgcctggccatcaatctctcatcaggtgtctctggagctgggggcactgtgcatcagccaggtttcattgtcgtggaaaccaattaccgactgtatgcctacacggagtcggagctgcagattgccctcattgccctcttctctgagatgctctatcggttccccaacatggtggtggcgcaggtgacccgggagagtgtgcagcaggcaatcgccagtggcatcacagcccagcagataatccatttcctaaggacaagagcccacccagtgatgctcaaacagacacctgtgctgccccccaccatcaccgaccagatccggctctgggagctggaaagggacagactccggttcactgagggtgtcctgtataaccagttcctgtcgcaagtggactttgagctgctgctggcccacgcgcgggagctgggcgtgctcgtgttcgagaactcggccaagcggctcatggtggtgaccccggccgggcacagcgacgtcaagcgcttttggaagcggcagaaacatagctcctgagagcgcgggacttggacacggacctcggcgggcgggactgggcggggcggggcatcagaactcaggtgttttttatttacgcgtcagggcttttcttgtttaataaagttatgatagctaaaaaaaaaaaaaaaaaaaaa

SEQ ID NO: 1043 - DNA, 644 bp, Homo sapiens
cagtctacagagctctctgacatttctcatgacacttgaaagaagggcttgagggagtctgggtgtgggggtggcctcctcttcctctttctatccctggctcagagtcggagctgcagattgccctcattgccctcttctctgagatgctctatcggttccccaacatggtggtggcgcaggtgacccgggagagtgtgcagcaggcaatcgccagtggcatcacagcccagcagataatccatttcctaaggacaagagcccacccagtgatgctcaaacagacacctgtgctgccccccaccatcaccgaccagatccggctctgggagctggaaagggacagactccggttcactgagggtgtcctgtataaccagttcctgtcgcaagtggactttgagctgctgctggcccacgcgcgggagctgggcgtgctcgtgttcgagaactcggccaagcggctcatggtggtgaccccggccgggcacagcgacgtcaagcgcttttggaagcggcagaaacatagctcctgagagcgcgggacttggacacggacctcggcgggcgggactgggcggggcggggcatcagaactcaggtgttttttatttacgcgtcagggcttttcttgtttaataaag

SEQ ID NO: 1044 - DNA, 2907 bp, Homo sapiens
gctccaggaagtgcgggggctccagccgcccggccggccgcgatgcattctggggaaggagcagcaccaaatccaagatggcggccagcaggaggctgatgaaggagcttgaagaaatccgcaaatgtgggatgaaaaacttccgtaacatccaggttgatgaagctaatttattgacttggcaagggcttattgttcctgacaaccctccatatgataagggagccttcagaatcgaaatcaactttccagcagagtacccattcaaaccaccgaagatcacatttaaaacaaagatctatcacccaaacatcgacgaaaaggggcaggtctgtctgccagtaattagtgccgaaaactggaagccagcaaccaaaaccgaccaagtaatccagtccctcatagcactggtgaatgacccccagcctgagcacccgcttcgggctgacctagctgaagaatactctaaggaccgtaaaaaattctgtaagaatgctgaagagtttacaaagaaatatggggaaaagcgacctgtggactaaaatctgccacgattggttccagcaagtgtgagcagagaccccgtgcagtgcattcagacaccccgcaaagcaggactctgtggaaattgacacgtgccaccgcctggcgttcgcttgtggcagttactaactttctacagttttcttaatcaaaagtggtctaggtaacctgtaaagaaaggattaaaaatttaagatgttctagttctgctctctttgttttaaaaatcactgcttcaatctacttcaaaagaatggtgtttcttttcttgtccaattttatccaaaatcttcaagttacatttaacccataaggtttaaaaaaaaggaaaaaaaacggttgtggttccctttcttccctacccttgccactcccactttctggcaccgagtttatttttcacttacttacttccccagaccccgggctcgcctccacaaaggagaagagactgccctggcggtcctggtggcttttcttagcatgtgtggcactgttgcccagtgtgggagttggtttaaattctcctgactccagtttataacatccttttaaaaaatttaaaaacaaacagccacacccctcctccagtccttctcctcagttcttgtgtgaaactccagctgatgttaccacagtaacatcagttaattgggcaagccctgatgtcagtgtgtgtaactgacctctggcctggcctgcacagagaagccctataatcacaggtctgtggtggccccgaaatggggggcctgctagtcaggaggatgctgtgcacactgtgtgtgatgaatctcgccagaaaggctcctgaggtcccaggttggcacttctccctgcagccattgtagaagatctgctggtccttgcaggcaaagctacagccagaatgtccgtttgaaactcctagctcatctgtcaccgagcttcatccgaatgtgccacggagcttgctctccacttcctccgtgcagtggccctgccacagccctccctcggcacactttgaccctttgtaggattggaattagcaggactcggctatttaaagcaccagtctggggtcgcctgggcccctgctgaccccctcctccagagcagccagcccagcccgggaacaagacggacttcctctcccttcggactcacagcctttgcagagtcaagctccacttgaagctcactcagtaatatcctttcaatgtgttttatattgttttgactgcctttttttgtagaaataaaaattgaccttagaatttatcgtcagataaacttgtaaagatttgaatattaatgtcttttcaaggcaaatgggattgtccccgcactagtagagaatccatgtcgctctgacaccccaaggaagccgacgatccaaatgccgtgtgtcaccaaccccgcttctgccactggcggcttcccttcttggctcttgggggggactagatcctgtggagaagatgacttaaactttgctttttgttttaattttaattctataacttgagatctttccggggcctacaggcgtgtaagacagcttggtctggtctgtgcagaagtggggagtgatgggcaggttcggcagcctaacattgttcaggcgcatggcccctgcggtgtgtacacgaactcggcttcttttgtcctaggtacgccaagggcaggtttctggagactcccttgtgcccgggatggcaagggcaccgggctggcgtttccacatctgtcttcattagcagaaaagtgatgatggattttatttcactcacactccagtttgtaataaaatgccaaattctgtcagctatccaaacaagccaccatttgttcttgttgcttctctggatccagaaatgttgccattcttggaaactgtcccattgcttcgtatttctgccaacgtagctctgcctgcctgtcaacccctcactgcactctgctcatcacgggaggatacctgtgtgccggcagcccctcagggactctcagccctggcactggcaccccagggttggccccgtcagcagaggcttggctttcgagccagtgggtgtctctcctttgggcctgggcggcttgctcctgccagccatgccttcagggtaggctctgagcaagctggcgaacagccctggctgctccaaaaccaaaaagctgggtcctctggaggaggggcgagctgtggagcagccacccactgctgccccaagctcactcaggaattcacacccgcctggtttcttgaagtgtgctgggtccttccctctgctccctactccccaccacggcagagaataggctttctaagatgctgcgatcccgttctgctgcccgtaataaaaatgctctcagacactg

SEQ ID NO: 1045 - DNA, 2744 bp, Homo sapiens
gtgcagtggctcacgcctgtaatcgagcactttgggaggccaaggcaggaggatcactcgagctcaggttgagaccagagtgagcaacacagggagacactgtctctgcaaaattaaagaaattttgccaggtgtggtggctcatacttgtggtcccagcttcacgggggctgaggtgggaggatcgcttgagcccgggaggttgaggctccagtgaactgtgatcgtgcaacagagcaaaaccttgtctcaaaaaaaaggaaaaagaaaaaagacatttaacaggaaaactggaaatgctagctgacagagagaaaaatagtccaaggaacaatttgctgtttctagtcagaggaccagaaaggaggttggaggctatgggacaaaaccctttttaatttaattgcagtattctaagagagcctcaggaaagatgcagtaagacccaccgccccaccaggagaaccatgggtaatgacttggaaccttctggactttccttgctctacatcaatcccgcagcagtaaagaggtatcactcttctcttccccctggtgcactagtggcagacattgcagggcagaacactggcaatggggaggctaacgccctgactttctagccaaaaaccaagaatggggttctagaaaccagagtataggtaagatcacaaataggagggaactgaagaaaaggaacccttaaatctgtcaataaaatcctgggatcatctcacaagctgtgtatgtgtgaaactaaccagaagcagctgagcaaaggttctgaacactgaattacagtgtaggccactgtccaagcttcagattggccactagatggtgcacaactggggcaaagaacagcttaacaaaggcagtgaaaactaacattggaaccacagccaccaaaaaaagtggccaggatgtgtgctctgaaacttaactgaattgatggtctgctaaaacaaaacaaaacaaaaacattcttatgaagatttaaacaggatagagaatatcataatattccaaatatatcccagaaacaacccaaaatgattggacaaagaacttgtgaaacctaagcaactctttaaggaaaagacaatgaacaagagccaactctaaggttacccaaatgtcagaattatcagaaaaagacttaaaactagttattttattttttttatttatttttgagacagtctctatcacccaggctagagtgcagtgatacaatcttggctcactgcaacctccacccccagggtgcaagtgattctcctgtctcagcctcctgagtagctgtgactacaggtgtgtaccaccacgcctagataattttttgtatttttaatagagacagagtttcaccacgttggccaggctggtctcaaactcctgacctcaagtgatctgcctgcctgggcctcccaaagtgctgggattacaggcataagccagcacacctggccgttaaactagttattttaatcatgctacacaaagaagacatttctccaaaggaaatatataaagggaaacactgttgaaataaatggaaagctaaaagtctcagcatagaagctataaaaagaaacaagtggaaattgtagaactgaaaatacaataacaaaatttactggaaggtctcaacacaatgaagatgactgagggaagagtcagtaaatttgaagatacatgagcagaaattatctagtctgaatgacagagaaaaaagtgaaaaaaatgagaagacctttggggatctgtgggacaatatgaaacagtctaatattcatgtcttaggagcccagaaagaacaattggaagaaaaaaatatctgaagaaataatagctaaaaacttccaaacatctggcaaaaaacaaatattcacatacatttacatagcattctatttaaagccggtctgctggcacagcaaatcccaaaaaggaaaaccacacccaggcacgtcataatcaaagtgatgaaaccaactgtaaagaaaatactttgaaaacaactggaagaaaacaacactttgtatataggagaaccaaagatttcagtgatggcagatttctcatcagaaaccatggagcaacatttataaagtgcttttaaaaagcaacaaaactgtcaacacagaatcctttatccagcaaatatattctttaggaaagaaaatgaaataaagacattttcttttttttctttacttttttttttttatgagatggagtctcactctgttgcccaggctggaatggattggtgcgatctcagctcactgcaacctccgcctcccggttcaagcggttctcctgtctgagcctccagaggagtagctgggattacaggtgcgtggtaccacgcccagctaatttttttatgtttgtagtagagacgagtttcaccatgttggtcaggatggtctcaaactcctgacctcgggtgatctgcctgcttcggcctcccagagtgctgagattagaggcgtgagccaccatacctggctgaaataaagacattgtcagaagaaggaaagctaaaataattcattgctagtagtcctcctttaacagaaatggtaaaggaagttcatggggaaggaaaatgattgcaaagaaggaagagcaaccaaaatggcaaatctctggataaaccaaatagacttatatgtttgttaaaatatatgtaactgctgaaataaaaaaattgtaacatcaaaaaaaaaaaaaaa

SEQ ID NO: 1046 - DNA, 371 bp, Homo sapiens; identical to SEQ ID NO: 95
  modified_base (8)..(8): a, c, t or g
  modified_base (104)..(104): a, c, t or g
  modified_base (173)..(173): a, c, t or g
  modified_base (209)..(209): a, c, t or g
  modified_base (316)..(316): a, c, t or g
  modified_base (331)..(331): a, c, t or g
  modified_base (341)..(341): a, c, t or g
  modified_base (365)..(365): a, c, t or g

SEQ ID NO: 1047 - DNA, 2118 bp, Homo sapiens
gtggaacagtcttgttatggagtgccagcttagaggttgttgcaaacttgtctagaagtgagagcatggttttttttagccctttgagagtctacatctaatgaacattcttgctcacccataaataacgtcaagcctcaatgtcaccgtcacgttgggatactctttctcatctggcatcctagacaggacaaggttggttacctttccttccatgaaccatgaacctgtgacggcatcattcatcctgacttcaccaagctccgcctgtgggtgaggccagagctcccactggcaatttttagaagagccagaggctccctgcttcctctagaaataacagttcagggtgaagcatggagggtttcagttcccagacaatggaaccatttagagacaacacagttggacatttccactttttccttgattcctggaagtccagtgggttctgcagctgaaaaagccctgggtcccagcagcagagagacaggacagaggggatgcttgggcggggagggacggtaacctgcagaacagattccatttttatagaacgagtacacgtttgctaaaacagtcctgctttcccagactggattcccaccacagggacagtcggaactcaggactagctccagcgacatctttcctccgaattcaagccttctatcacaatgtcaaaacagctatttataaagccattttcattgtacttgataacagcacgagtcccaaaacttttagaaataaaataggacattggcttgattgaaaagagggactttttaaaaattgttctttcgtcagaagccttttggatgacttacaatagctctgatgaagataccaccccagcgtcagtccaataggtcagtgagtttcaacaggcatccatccctcccatgaagggattctggtgatgggaagtttctgtaatgacaggaaagcattgaccctcattgattgtcaactttggtattagccatgaaagacaggatgctcattgggtgttctgtagagtgaggaatgctgcctattccctcccagaacgtctgacccaggggtgtgtgttgaggagccctgggggaaatggaccaagttttcccacagagcagtattaggctgaagagcaggtgactggtaggccccagctcccatcattccctcccaaagccattttgttcagttgctcatccacgctggattccagagagttttccaatttgggaagccatgagaaaggtttttaaatcttgggaagatggagagagggacataggatagttgactccaacatgacaggaagaggctggagattgggaattggccatcaaccaagcctgtagtagtaaagccatggtcccgcattggaattacttggggaacttatacagttctgatacccaggctctcctagaccagttcaaccaattctaggtgggggactcaggcatcagtgtgtttcgtagctccccgggtgttttccctgtgcagccgagcttgggaaactgccatgctttttggatgtcaaggcgctgttggaggctgggtgtgacagcacagagccaggttgtcttgtggaaaccacagccacgggtttgccactggctcagcatggcctcactgccagtcccagcctggctgagggacaagatggtttctcttgggagttcctgagtggagcacccttccaggctttttgaaagccagctgatctgtggagccttgttaagggactcaatacggtgtttggatattgatgtttttccttgagactgtcttgtccatcaataaagatggaggatgtctcctctttgaaccccgcttccccaccagtactctctctcccttagagtttatgagttattcaaggaggagacttcttaaagacagcaacgcaattcttgtaacttgtgtaaatagccccatctttcagagtgataccatttctacatttgataatgcctgtattcctgtaggatgtatatagtttaggggattttttttttgtttggttttgttttttagaagtcaatatgtctggttttatttattgcttgaaaaagatcatttgaaaaaaataaatacattttcaaccacaaaaaaaaaaaaaaa

SEQ ID NO: 1048 - DNA, 2062 bp, Homo sapiens
ctggtgaaaacagataggaaaaggaagttgcctggttttgttggaacctatggtccaccaaaagaaactgagagaggtaagactgtacaggaaacctaaggccagttacggccagcattgagcatcacgctaaagggaaggaattttactctgggaattatgagaaaccattttaagtttctgagcaagaaagacaagatggccgctgcacgcagaagggcctggagagagggggaacgggcagcggggagcctcacaagaggactacagctggaaccatggcactggcagggggcatggaggagaaagagaagaaaaacagtaagcaggcaggaccatccgaacagatcctcaaagctgccatggacctcacttccctgtccccacagggaggctgctggagacagagcctatttggggaacacaaaccacgggtctgacacgtctgagatgagctgccgagcctctgcctccactctcattcagacactcagcttttccgaactactccaagcaccaggctgatgaggacatgggaaacccacgctctggcaaagccgggcccaggtgttgaacccctacccagacgccttccacctgaatccccacccaggactgtgtccaagggtgggactaggcggctctgcccctagagccaccttcattgcggcagccaccactgtgcctgcctctgctgtgcttttgcccccccttcccctcctccgtcatagcccccgccccccgcccactctgcggaactggcacagcaggacagaaaaaccaacgccaccatgtcggagaccagcagaaatggctccaaaatggcagctcatcagaggagtccagaaagatcataaacccacccagggaaaagaggggaagccagtgacaaggggagtaaactgtcaaaactacctcccaaccaagcccccgataatcatcacatcttttccttcagaaacatcctctcaaaaatcagatgggacatgagtgaaagaagggtgccaccccctccaccagagaggccctaggggccataggtggtatggggcactcagaaggatgttctgtagcctcttccccaagatgaggctagaaaaccaccacttttgtcctcaagcttggctcctgccagtaactagacaagagttagccctcccagggattgcagtccttcactgctacccagtcagaccctccccagctctatgggccctggggagcaagaaggtagggttgcaaggaagggccgagaaggcgcgtgccatgccctcagttatgtaataagaagggcggtgctcgtcctaggccagagacccagggcgcactgcgcttccagatgcgcagtcacgggtgggggccactgcgcatggcgcagggcttggtaaaccccctccccacaaacgtgagacctgcgacaaagacaggttagagagccgggaccctgatttttcgaggcctccctcccccaaccaaaggcggacagcctgctgccctagttttattctgattctcctcattccctagactgacaaacctttctaacccggggcctccaaacctcccgtctcccactgacttttctggaaatcccaccagatgcggagtttcgagcaatttcctggggtcagtcccccatcctcacctttccaagcaccacgtagtagtagcttccagaaggtagatctttcccatactgggctcagctcacaactggctcttgagggcctctggacagccccggacgtcaatgcaaatctgttgtccccagggagtagcccagagtcagcaggaagcccagggtggtggcagtatcagcagcagcagctctgccctaccttgcccatgcgtttccaggggagccaagaattattttgccgcaacactgaggtgtggctgattggaaaattcccttttccaacaccaaactacagaataaatattttcttccaatttggtcaaccctctgcatacccatctccctagcattcttccctctaaataaaaagttttgggagccctgagctcttcctccttaaaaaaaaaaaaaaaaaaaaaaaag

SEQ ID NO: 1049 - DNA, 550 bp, Homo sapiens
ccctatgggaatttggccctcgaggccaagaattcggcacgaggcggggcctccaaacctcccgtctcccactgacttttctggaaatcccaccagatgcggagtttcgagcaatttcctggggtcagtcccccatcctcacctttccaagcaccacgtagtagtagcttccagaaggtagatctttcccatactgggctcagctcacaactggctcttgagggcctctggacagccccggacgtcaatgcaaatctgttgtccccagggagtagcccagagtcagcaggaagcccagggtggtggcagtatcagcagcagcagctctgccctaccttgcccatgcgtttccaggggagccaagaattattttgccgcaacactgaggtgtggctgattggaaaattcccttttccaacaccaaactacagaataaatattttcttccaatttggtcaaccctctgcatacccatctccctagcattcttccctctaaataaaaagttttgggagccctgagctcttcctccttaaaaaaaaaaaaaaaa

SEQ ID NO: 1050 - DNA, 975 bp, Homo sapiens
gggggaagcggcgagggcgagccgcggggtctcggcgcctctgtatgcttgcacttaacgagaacccagagcgaacacgacccacatttctctttttgttttaagaggaaatataggagttacagcatagaattacaatatctggacattagaaataacaggtcccggtcacggtatggcaccgcgcgacacacttggtccctgaggcctggatgccgctcagcaaacgttcgcggaatagggttgggtttactgtcccccaccgagccggttgctcattcattcagcataattgaatacctcctgtgtgccaggcactgaatcaagtgtcggagacaatgtcctgccctcaagctcctggccggttacttgacaaccttccgggacctcaacgctatgtgcctactgtgtgaaagcaaagtgccaggtggaggacacaaagatggcgagcgacacaggatagtccttaacaattaagcgtgactaattttaataacaaatgagaatatgatgtgacatccgttccaaatcctgtcgttccaagtaacttcttaagcatctttcacgatacagcctctgcttgaaaggaattaaaacaggtacaagcatggaaggagacgttgctatcatatttcaagaataagaaaatgctgttttgtgtggttgtgcagcaggcaatgaaatgagcttacaatcaagcttccgtgttttactgaaacaacagtcacagatgcagtagatgttaaaggttgaaagacgagtgcagtaaaagcattatgaggacaagaagaaaacgtaaatatttgtgttgtttcattctttgttgtggtggcagaaacagccccctctttctaaggtaactccaatataatgatctctcccagctttgaaatactccatgtctgtttcattttccagaagtatggaaaaatgaatatataataaaaaaccctatttcccaaaaaaaaaaaaaaa

SEQ ID NO: 1051 - DNA, 700 bp, Homo sapiens
  modified_base (156)..(156): a, c, t or g
  modified_base (285)..(285): a, c, t or g
  modified_base (592)..(592): a, c, t or g
  modified_base (606)..(606): a, c, t or g
  modified_base (645)..(645): a, c, t or g
  modified_base (654)..(654): a, c, t or g
  modified_base (675)..(675): a, c, t or g
  modified_base (683)..(683): a, c, t or g
  modified_base (693)..(693): a, c, t or g
  modified_base (698)..(698): a, c, t or g
ctcctatgggaatttggccctcgaggccaagaattcggcacgaggtttgttttaagaggaaatataggagttacagcatagaattacaatatctggacattagaaataacaggtcccggtcacggtatggcaccgcgcgacacacttggtccctgnggcctggatgccgctcagcaaacgttcgcggaatagggttgggtttactgtcccccaccgagccggttgctcattcattcagcataattgaatacctcctgtgtgccaggcactgaatcaagtgtcggngacaatgtcctgccctcaagctcctggccggttacttgacaaccttccgggacctcaacgctatgtgcctactgtgtgaaagcaaagtgccaggtggaggacacaaagatggcgagcgacacaggatagtccttaacaattaagcgtgactaattttaataacaaatgagaatatgatgtgacatccgttccaaatcctgtcgttccaagtaacttaagcatctttcacgatacagcctctgcttgaaaggaattaaaacaggtacaagcatggaaggagacgttgctatcatatttcaagaataanaaaatgctgttttngtgtgttgtgcaccaggcaatgaaatgagcttacattcnagcttccgngttttactgaaacaacagtcncagatgcngtaaatgttnaaggntg

SEQ ID NO: 1052 - DNA, 733 bp, Homo sapiens
  modified_base (727)..(727): a, c, t or g
ctggccgcgcgagcggcatgcacgcgtgaagccgctgatcgacgcgatcagcgcgctggttgcgacatcgctcgcgcactgacgcacgcgtcgcctcaaatgctgaactccgccgcgacctcgcgcacggtttcaagaaacgcaccgagtaccgccgacgtatcgtccgcacggtagcgcgcctgcagcgacacttccagcgccggcggcaacaacggcacgaacgtgacgccgcccgtcgaaatctgccgtgacgacgcaggcagcagcgcgacccccagcccttcacgcaccagcgacagcagcgtatggacctcgacgacctcatgcgcgatctgcggcgtgaagcgcgcatcgacgcaactctgctgcaggaaacgcgccagttgcgagtgccgcaagccgaacgacacgaactgctcgccggccagctcgccgagcgcgatcgcatcgcgtgacgcgagcggatggcccggcggcagcacggccacggcggtttcccgcacaacgatctcgctgcggatcgacggatcgtcctggaacagccggaagaaacacacgtcgagccgcttctccttcagcgcgtcgatctgtgcggccggcgtcatctcgtgcagcgaccagtgcacgtgcggatggcgttcggcgaacacgcgcaacgcgtgcgggatcggcgcgaccatcgccgaactgatgatgccgaccgccaggcgccccacttcgccgnggcccg

SEQ ID NO: 1053 - DNA, 549 bp, Homo sapiens
tggacacataagaggctgcgtataggcgcgagagcccctttcctcagctgccgccaaggtgctcggtccttccgaggaagctaaggctgcgttggggtgaggccctcacttcatccggcgactagcaccgcgtccggcagcgccagccctacactcgcccgcgccatggcctctgtctccgagctcgcctgcatctactcggccctcattctgcacgacgatgaggtgacagtcacggaggataagatcaatgccctcattaaagcagccggtgtaaatgttgagcctttttggcctggcttgtttgcaaaggccctggccaacgtcaacattgggagcctcatctgcaatgtaggggccggtggacctgctccagcagctggtgctgcaccagcaggaggtcctgccccctccactgctgctgctccagctgaggagaagaaagtggaagcaaagaaagaagaatccgaggagtctgatgatgacatgggctttggtctttttgactaaacctcttttataacatgttcaataaaaagctgaacttta

SEQ ID NO: 1054 - DNA, 2560 bp, Homo sapiens
ctgtccttaaacactcactcctgaccttacaaccctggctgttacctggttaacaagccccaggtgttggctacaggtgtcatcactgagagcccttgtgtgcagatctgccccagctctcccacctgtgactgaggctagcaagtcccccgtgggctgtagagcctagcgctggtgtcagaatcgcttgttgcaggttcatcttcagtgtctttcccacagccacatgctggggaaagacggcaaaggcgctagaggagcaggagaacaaagcaagctgccccagaccacccggctttcgcagaacccagatgatgctcctgtctccccctaagtataacgtgttatttagtcagtatgatcccattcagtgcagaagtatcgcctaggaatttcctgccccacccaccctgttttgttcttaatgaagttcaagaacaaaatgagatgatagtcaagttatggagcaggctgcagtggatacaagggcagaaacacagtctttggagttagacctgggatctgcattgattggttgtgtgactgcagacaagttatttagcctcattaaggatgaatttcttcgcaaaaattggaataatacctgccccatacgactgttgtgagaattaaacactgcaacttttgatgttcaaattctatttcttctccttctagcaacacatactgttagtgccaggaaccataaaaattataaggctgtatctagaggcctgaaaggaagctaaaatatacagtttctactctgtctcttttctcttggttatggtatcagaggaaatacacatattttcttagcttcaaaccaccaaaaaagatgatgcagtaaggagatgggaaatctaatttggaatacagtgtgcaaatcttattttcaagcagactttgaaaataaaactcaattcttacgttagaggattatctgcttaatacaattatagggtaccagtttttgaagtcacatcggggttaaataagattgcaggttcatggggtcatatttgaatgttctgatacttacatatggggtgggaaggaggaatgcatgcttttctcaagttaagacacataaaagagttgtcctggcccaggtgagactcgcctttgtgtagcagctggagcttcattgcacaggcagatagggtgcttgtgtcctgatgaagtaagagaatatatctggaaacactttgtgtactgtgaaatactatacaaatgcagggcagtacaaatgtaaatattaatgtattttagtaataattttagcttttatttcatcatatataataatttgtagtgactggtgtgaagttaaatagaattaacctagaattaatgagttttgtattgctctcatctatttgaagcatcagctgtgcctttcatgttgccttgtgcagccctgtgtaacctcctctgtgcctttcccatggagcactgtgtcatatcacaagtagaactacaggaagatatttctcctcagggcagaggctgggtcttccgattgaatctcccttctttcttcattgagatcctcttcttctggaagctggtttcacatggtggcttagatttttccatctttgtatctagcaccatttgaaatcagtgttttaggagtaagaattgcagcacagccaagggtggactgcagaggaactgctgctcatggaactggctcctctcctcttgccacttgagtctgttcgagaagtccagggaagaaacttgaagagcaaaatacactcttgagtttgttgggttttgggagaggtgacagtagagaagggggttgtgtttaaaataaacacagtggcttgagcaggggcagaggttgtgatgctatttctgttgactcctagcagccatcaccagcatgaatgtgttcgtagggcctttgagtgtggcgattgtcatattctgttggataacaatgtattgggtgtcgattgtcatggggcaggggagagggcagtacacctggaggaccattttgtccacatcgacaccatcagtctgctcttagaggatgccctggagtattcggcgttgattgcggggcacccgaaatcagacttgccacctggactgtcgaggtgcagaccctgggagcaccactggcccatctcttacacaggctgaccgatttctcctggtgttcagagtctgtttttgtctagcaccatttgaaatcggttatgatgtagggggaaaagcagcagcctcgaagcctcatgccaactctgggcagcagcagcctgtggtttcctggaagatggatgggcagagaatagggaaggaagatcatgcttttccctactaacttctgtaactgcatgtatgatacattattgcagaggtaagagatagtttaatggatttttaaaaacaaattactataatttatctgatgttctctagttgcattttgctgaaatgtagtgctgttctaaattctgtaaattgattgctgttgaattatctttctgttgagaagagtctattcatgcatcctgaccttaataaatactatgttcagttt

SEQ ID NO: 1055 - DNA, 1000 bp, Homo sapiens
  modified_base (2)..(5): a, c, t or g
  modified_base (7)..(7): a, c, t or g
  modified_base (13)..(14): a, c, t or g
  modified_base (71)..(71): a, c, t or g
  modified_base (530)..(530): a, c, t or g
  modified_base (636)..(636): a, c, t or g
  modified_base (638)..(638): a, c, t or g
  modified_base (794)..(794): a, c, t or g
  modified_base (825)..(825): a, c, t or g
  modified_base (829)..(829): a, c, t or g
  modified_base (876)..(876): a, c, t or g
  modified_base (891)..(891): a, c, t or g
  modified_base (898)..(898): a, c, t or g
  modified_base (900)..(900): a, c, t or g
  modified_base (915)..(916): a, c, t or g
  modified_base (922)..(922): a, c, t or g
  modified_base (926)..(927): a, c, t or g
  modified_base (934)..(934): a, c, t or g
  modified_base (944)..(944): a, c, t or g
  modified_base (949)..(949): a, c, t or g
  modified_base (952)..(952): a, c, t or g
  modified_base (965)..(965): a, c, t or g
  modified_base (974)..(974): a, c, t or g
  modified_base (978)..(978): a, c, t or g
  modified_base (987)..(987): a, c, t or g
  modified_base (990)..(990): a, c, t or g
  modified_base (994)..(994): a, c, t or g
gnnnnanacaggnntaactcctatagggaatttggccctcgaggccaagaattcggcacgaggggcttcanaacaggcaggcaagggctgaaatcctatctctgccaccgaacagctaatgaccccagcaagcaatttcacatccccgaactttcctgtttcctcatgtgtcaaatggggatgatctcgagacgactctccagagtaaccacgtgaagcacctagcacaggggctgacgcaaacagctgggcatcggaggagcctccagggttgtgacctccagtggcttattttccttttgggatcttctctcctagatcctcccctttaattccctgtgaaatttaccactttcatattgaatcgttggcacacagggctaactgcttgttcacctgaaggaagctacagagttcaggtttcttttttctttctttctttcttttttgcttttttaagatgatcttgctccgtcacccaggctggagtgcagtggcgtaatcatggcttcctgcagcctcaaactccngggctcaatgagttccttgagatcttccatcctcagcttcccaagtagctagtagtagtagtggcttgcaccaacgctcctgccctaattttcaatatttttttgnanagataggatctcactgtgttacccaagctagacttgaactcctggcctcaagcgatccttccgccttggcctcccaaagtgttgggattacaggcattagctaccacacctggccaaggcccaggtttcgacagaaagggagagaaaacctgccanagatgccatttcggaacccactctgcttggnaggnacctgggttccccctcatgcaggtttcatccttagaggggctgcggntctttatctggttgngcaaaantncccacaacccttttnnggaatngaanngtttggngggggaaaanaaaanaanttttaagttttgntttgggganaaantctttttgntanaccnaaattc

SEQ ID NO: 1056 - DNA, 4050 bp, Homo sapiens
gaactttatagaaaggctaggcaaaaaatgagacccagagatatggaagaaactggccaaagaggggaaagtgggctatttcttttttttttttcttttttctttctgagacagagtctcaccctgttgcccaggctggagtgcagtgacagcgatcttggctcactgcaagctccgcctcccgggttcacgccattcttctgcctcagcctcctgagcagctgtgactacaggtgcccaccaccatgcctggctaatttttttatatttttattagagacagggtttcaccatgttagccaggatggtctcgatctcctgaccttgtgatccgcccgccttggcctcccaaagtgctgggattacaggccaccgtacccggccaggctatttttttgttttgtttttgtttactactgtattgcttttctctttttcatatttattgagcacctactatatgccagtcactatgctagatgctttagtaacatgaaggtttcaaactaagaaaagctcaacaaagagccctttagaaaggtaacagttttcctgtgtattgggggagtgggtctcataaggttgtatgatgagaagcgcaagtaattgttttgtttttttttgagacaatgtcttgctctgtcgatcaggctggagtgcagtggcgtcatctcagctcgctacaacctccacctcctgggtttaagtgattctctggcctcagcctcctgagtagctgagattacaggcacgcgccaccacgcccggctaatttttgtatttttagtagagacagggtttcactatgttggtcaggctgatcttgaactcccggcctcaggtgatctgcctgccttggcctcccaaactgctgggattacgggcatgagccaccacgcccagcctggctaaggttcattatccccatctttcagatgaggaggcacacaactctccccagatcccacgtcacagagaatgcaggtctgagtctgttccttgagctcagggtcttggcaatggtgatgctttggagctgcagaatcctctgttggggatggggctgccctgtgcattatagtacgtttagcaacatccctagcttccacctactaaatgccactagcactccttcagatgagaccaccaaaaatgtctccagatgttaccacatgtcccctggggggtaaaagtgcccccgttgagagcactggctcttttcttcacagtcctgacctggcggcctgcacaggccacttctccgaagtgtttcaatgcactctctgccctgggtaccttggacacagcaccctggcccagagaggttggctgacttgcctgagacgctgcttcctgggagacgcagtagcatctttcctttctgttctggttatctttcttagttctttaccaccttatattccccatgacaggtgtgtttatgtacacacatctgcctcactccactcagctccctgtcaggtttcctgccagtctgtccctcttccttcaggctcagctacgtcctgcacagacagtaccactgcacatacctgtgtgtgcccagcggtggacccacctccaaaagcagccagtgctgacagcagagagccttccacactcaagtcaggccaagcaggaatcgctacctgcctgtcatgaccacattctcagtgaacattgacaaagcccccttagcagctaattagccctgccgtgcgctagggatgcaatttctcatctggcagtgcgccacactcctgcctccctgcccaaaggacgtagtggctgctgctgatcgtctgcactgctgttccaggggcaggaggtttgctgcaaatcaggtacccccagctcagtgagcagaaccagtccaaggttgagtgaggagaagggcaagaagggcaggcacagccgtgagtatgttctggggctaagtaaccatgaggtcagcccagagaccttgcacagttaggcaggcctggacttctcgcccttccccttgcagcttctgctctcccagctagggactgaggaaagccctgcttctagatgccatgtgctgctgcctggcacgataggtacccatctgtccttggggttcctgagcctggagagcgggctttgtgagcactggtgcctcacctgcctggctcagctctgcagccacaatatatgcttaatacctatttgttaaatgattgaagacttgactgccattcagtacagagaattagccaggtgaataaacaggatgtgtcatagaggttctagaattgatcatgaccctttctgtctcattcctgacttctaataccgtatatgccaaatggggttctgctgtgatttaatttcttaaggactgggtttatcaaaagtccctcctgatctaatcctttcctctaggaaggcttctcctttcttcatctgtcctaagtgcatggtcttcatctcctgggtggtccagactaggtggcactgggcctgcaggcctctagctgctcaaggatggccctgtctgcatgcttcctttcaaaagctagcatagaaaggagggcccaaggtgaggaaatttgtccaaagtcacccaatgagtcgcaggaagggctagaatctggttatctggaccgtcctagagcactttcacagtgacagccggctggaatcaagttttcatttagaaaaatggctagaagttagggcattgcctgcagccactgaaaagcagctttaggagcagatgtccacgtaatagaaggagatgggctagggcctgccacggaagccagcaagcgcgtgggagctgggggaggaaaggagcaaaaggcaagaacaggcagtatgtccgcggtgcccacagtgctgtgggtacaagcaaggggaaaagagcccatggtgtgcagaaaaccatgcgtcatgattcttatttcctgctcgcagctttgactctctgcctcatctcttcctggaagtgtcttggaagttaggcgactgcacagggaaaggttcgctgcagtgcttgcaggcctgcacccatttattcatccggtggatatttgctgggtgcccggcctggggatccatggtgagcgaggaaggcatggtattgaagtggtatgcctgcatgaccttggcgggggcgcatggcatagagaggacaggcttcagaacaggcaggcaagggctgaaatcctatctctgccaccgaacagctaatgaccccagcaagcaatttcacatccccgaactttcctgtttcctcatgtgtcaaatggggatgatctcgagacgactctccagagtaaccacgtgaagcacctagcacaggggctgacgcaaacagctgggcatcggaggagcctccagggttgtgacctccagtggcttattttccttttgggatcttctctcctagatcctcccctttaattccctgtgaaatttaccactttcatattgaatcgttggcacacagggctaactgcttgttcacctgaaggaagctacagagttcaggtttcttttttctttctttctttcttttttgcttttttaagatgatcttgctccgtcacccaggctggagtgcagtggcgtaatcatggcttcctgcagcctcaaactcctgggctcaatgagttccttgagatcttccatcctcagcttcccaagtagctagtagtagtagtggcttgcaccaacgctcctgccctaattttcaatatttttttgtagagataggatctcactgtgttacccaggctggacttgaactcctggcctcaggcgatccttccgccttggcctcccaaagtgttgggattacaggcattagctaccacacctggccaaggcccaggtttcgacagaaagggagagaaaacctgccagagatgccatttcggagccactctgcttggcagggacctgtgttcccctcatgcaggttcatccttagagggctgcggtcttatctggttgtgcaaaagtcccacaacctttctgggttgatagtttgtggtgaaataaacaattttagtttgtttggag

SEQ ID NO: 1057 - DNA, 1817 bp, Homo sapiens
aaatatacccatcttattttaagttgggtttatggcatcgctcatatatgtaaaagcactacaaactctttaaagaaaattgggaaactacagagaagtcaaagaaaaaaaaaagtaacccatatttctattgcccaggtataatccttgttaatattttggtttggtctcctcttttttcccccaatatagttgtaaataaatgatgtctttcagagttgacatttatcctgtagcttgaatggcatgtaaatgccagttgtatattttttcatgaagtgtaggtttggaatacactagagttagctatatgcttgaatgctgatcactggattctgagactgactactgagtctacctttttaatcaagcctaacatgaatgggctccaaaaagtaatgaatgtaattgtactttttgatgtgcctctgcacttggcttggtgagtcatcataaatagctgttaaatatgtgactttacagattttgatatgttcagattgtaaaaaatgaatagtttatttcattaattgatgggcagtcaagaatctccctcccttcagtagggctgacacttaggagttaggtcatggttgtggttacttggcatggctaatcagattttgttctggtcagaatttgcccaagatcaatacccagcagaaactggagttaggctataaaaaaccattcatgtttccgagtgatcatttcagtcagcgattcatgttttacagtgtttagttgttgattattagaaaaagtaatattttcttccctttatgattacatcattataaatcaagtccttccatgaacacatttaaggtgtgtggagatgagatctctgaatccatttggggatgggctgcatttttggggaactctatgcctgtccagtgaagagtgcctaaaacattaattatagatcaaagatgttctgttgagggacaaagcttgatggtcatcaaacacaaggctttgtaaaaatacgaccacctattccacttactggatctgtcaggtgtgtaaaacttctctcgccagttcatcatgcttccatgagccctcaggactgggatttgagccttcctggctctttatcccttggggcagacatggaaccatctctgagggaccaggtggatgctgaagctcacccagtcagggcccctctcctagctccttttacactgaaattaatctgaaagctttcatagccaaggctttgcctaggtgctattattccagctggccaaagagaagtcttgggccagattgggattctcaatggattttatagacataattcccctgcaaacttaaaaaaataaataacccctactttataggactaattgtttgaattgtatctttctctgtatgttaaaccagatttaaaactattttataaccacaatatgtaatcagagcaatatagtgttttcagatatataccttgttttataccttatgtaggtgtcctacataagggtggcatgcccactggctgtggtaaaatttaatcctcattgctttgggagtgacttaaggccttttgaagtggagcttttgcactttatactttttctgtgaactatgataactatatttgatattaaagctgtaagtggcattttcagcaaatgaatatgtacatgtttgtgtctatttccaaaatgatttctgaactatctgcagtgaaaatgtatctgatggattgtagagcaaagcacattgcctaaattcatttgttaatgaattgggtaccattgttattaaaaatgcgtaaagtaaaaaaaaaaaaaaaaaaaaaa

SEQ ID NO: 1058 - DNA, 306 bp, Homo sapiens
tgtctgttactaatctctattctaaaaattcagctcaattctcaaccatactccaaactctctcttttccagctacctttactccctctccttcaattccactttcctctgcttactttttttttttttctgacagggtctcactttgtcgcccgggcaggagtgcagtggctcaatcttggggctcactgcagcctcaacctcccagagggcggggtttcaccatgttgcccagactgggtcttgaactcctgaggcttaagcaatccacctgcctcgggcctccccaaagtgttgggggatcac

SEQ ID NO: 1059 - DNA, 3337 bp, Homo sapiens
cttgaaatgggctgagtccctcttgctcacccttgacttggaaaaaccagtttctcttttattgtctgttactaatctctattctaaaaattcagctcaattctcaaccatactccaaactctctcttttccagctacctttactccctctccttcaattccactttcctctgcttactttttttttttttctgacagggtctcactttgtcgcccaggcaggagtgcagtggctcaatcttgggctcactgcagcctcaacctcccaggttcaagcgattctcctgcctcagcccctcaagtagctgggactacaagcgcacaccaccacgcctgactaattttttgtatttttttgtagaggcggggtttcaccatgttgcccagactggtcttgaactcctgagcttaagcaatccacctgcctcggcctcccaaagtgttgggatcacaggcgtgagccaccgcatccggcctcatgttctttttcattaaagagataaatcaactattcaggaccggcccccacctttcctcaggagtcatttctgttccgcacaggcctgctgaactgggtgctttatatagggtaagtgtttctcattttttgttccctgtcctcaagccttaggggcaaaagaaacatccaagatttgaaatttcttttcttcttctcatctgcatggctgtagccatctctctgttctgcattatcttatgacaaaaaaaaaaaaattcttattttgaagcaaactcaaagctaggtcctgatgtctcaaggcacaggtactcgtacttaaaggtgagtctgaaatctgtggatttggggaactttggaaaaacaaagatgagtggctagatcagggggctcattgggcaggaagaggagactggaaaatgccatattcactgcaagtcaattatcaacttcctccaaggctaaaatagctgaacctgctgcattttaaaccaatcctcagccactttggtgttttctcaaggatttccagggatcccaggcagtaaattctgctgataataggaattggtgtgataaggtgggtgctgagcagtttaagcaccaagattgtagctctgtctggttttgtggagatttactcaactagaagaacagagatttggctggtttttcagtcctggggtgcagggtgcacctgtactggaaaatttaggacctggtttcattctttgagtctcatgttcaagttggttttaatgttatgaagacacttgggacgcaatcctgagggcagctggggggaagaaagtggtcactggatggacttaccctgtagcgagcccatgcatggtttgttctctgatcgtgcatgtgcttggctctagacccatgtaaccatggtgaaggccactgggggattcagttggcaaaggcatagtgggcagaagaatcttgaacaaggagtccagagcaggtcaagtctcctgatacaggttgtgactcatggttttttgtctctgcctgtagcagctacaggtctgtaaagcaaggggagagtgataaggaaagaactcacctttctggggctctctgacattaatgccacctcccatttgctttttgcagacactgtcatctctcaagtacccatcttggagggtacggaccccacatgagggtgaggctctctgcacactccagagtgaggactttaataatctagtggactgtacatgttgggaggggaagagcggggtgccgagggtctggagggagaagaattgactgccccttttgctcttggagttaagcagaaatctaaagagaaggcaaagaatcttgccttcctggcgtcatttcctcctaccatcccaggccatcatttatttattacagccaacagactggcctctttcttccctttgactgggaatgggtcaaaggcggtgcaggaggaggatctggtccagataattcacaagcagggtgcattttcctctcattattgagaactgtgagtgtttatcaagaaggcagagcaggagaagatgaaccagtcttcttcccctcactacccagatctctgcctgccaacaagccccgtgttcaccctggcaaagagtctttacattcagaccaaggagagtgtgactccttctcagcactagctagaaacctcaagcccttgcttaagggccttttccagagagacccaatgcccagaaggctagatgcgtggggaggagccacatacgagaaactgcctccctgcttcgggtcagaacaagccccaggaagaaagtatttcaaacaacaaggtgcatctgccccaacccatccagcctgcatgttggtgctgagaacagccttttatggggcttgcactgagccatgggcatgtctgaacacaacaaggaagaggccagagcagcaacagcacgcaaagggttgatgggcatttcttttaagacagagcagaaaactcttagatactttgcgtccttcctatttgactcagtctatgaaagccaggttagcttgctttcttcctccctaaatcctccatcctcatgaccaacaaagaaatagtagaatcattttccaggcacatcttggggaggatgtggggccattggaggctgtccttcctagataagtctttaggagtgagaacaaggagtcttaccctcctctgtccacccacccccatgaatgggcctggctccagccaggagttgtggtttttcctgagctcctcacctatctcttctggatttcacattggcaaacggggttgcaaagtgctcttcgtgctctttggacagtgccttgtggagaggaatgcccatgcccctgcattccaaggccttggtaagcaagctcagagtagctggatttttctaaagcaattgcagaacacctgctttttctttgtttcctctagaaaggaccaaccacgccgagctcagttatggcacacacagtgggacctagacaaagggagagggtgaccgacatcccaactagatttcagtggagtgaagttcaggaggcatggagctgacaaccatgaggcctcggcagccaccgccaccaccgccgccgccaccaccgtagcagcagcagcagcagcagcagcagcaagagtaactctgacttaggaatagagacagccagagagaaatgtgatcaatgaaggagacatctggagtgtgcgtgcttcttcagagggacgggtgatgggcagattggaaaaagcaccgcagatgggaaccttaatctttcttttctaaaattgatgctatgaaaatttgcgttttctgtaacttgtaaaaactaaaagttgcttgtctactg

SEQ ID NO: 1060 - DNA, 800 bp, Homo sapiens
  modified_base (36)..(36): a, c, t or g
  modified_base (768)..(768): a, c, t or g
  modified_base (776)..(776): a, c, t or g
cagatcgaattaatacgactcactatagggaatttnggccctcgcaggccaagaattcggcacgaggtctttcatttcaacgttgaggtctagtgcacacagaacttgaaacaccgcactctgtcaacagcaataatccactcagtactgtgggatggatgggttaatggatgagaaaacggcaccaagactgactttgggtatttggtatatttaccgtggttacactctggactggttgattcttctgcatgtgatatagaaaaaagtgctgcatgcggtgaacctgtcagtctgggactgggggtgagttgttgttatgagtttggggtggtgtgaggaaagtgaatgctgcttagctcatctgtagctcattgcaatgaattcagtaagaatggagtacagggattatctgtgtagcataggcatgcaatgtttgaccaagctcctacccccttctccctctcccttcccctgactgttccacccaggaggaggaaacttcagatagccgtgctcacagttttttattttaaaggaatttggctggggagctgaacagggctccctgtgatctgaagaaagcttttggtgcttgtcctcacaaccacctcagtcctccctccctgtcctcccctgtctcctttcctcctcctgggttcatgttgtaataaaagaagattgttggtgtgtaattaatttgttcaaaagaaaaaaaaaagcaaaacaagaaacttggttccaactgaagcctatttaaatttaatntaataatnccccccctggttaaaaaataaaac

SEQ ID NO: 1061 - DNA, 452 bp, Homo sapiens
  modified_base (82)..(82): a, c, t or g
  modified_base (85)..(85): a, c, t or g
  modified_base (324)..(324): a, c, t or g
  modified_base (367)..(367): a, c, t or g
  modified_base (428)..(428): a, c, t or g
  modified_base (440)..(440): a, c, t or g
gcacagggcaaagcaggtctgggctctggcacacagagttcatgtttgcgccctctccctgcccctcaccccagaggtgagnagngaatgaggggcattggtggttaggccggttggctgtcttgaacagctggagggaagatgcaggggtgggaagcggccaggcagaaagagctccaggctcttgtgtcgcccacccagccctcccatacttcactcctgacagctttcctgcactgcagcttcctgcttcctctgactctagtggggaacaggccccagcttcagccttccggcaggggaggttcacccctccatttcagnttgccctggaccttccgttcgcaaaccccgagctttccaagcnttttgctttcagccctgcgggtttccccagaagctggggtttaggggttggagatgccgcntacaaacgattncgggggcttcaa

SEQ ID NO: 1062 - DNA, 2727 bp, Homo sapiens
cacgagaagacaggaggaagaaagggagagagggccaggcagtcgcactgtgaacagaacaggagaaggcgaagcggggcaaagttccctgcccaccgacgccagcctgcttggatgacttgcctcgtttcataattcacttactgtctgcaccagccggcctcagcctggctggaccctgctgcctgtgtggcccggagccagaggcccccacactcccagctgctcttctacagatgccatcaacgagcaggactctgggtggctccactgtctaagcctggagagtcaccgccgagggatgaggacgcgccagcccgggggaacgcgccagctgctttcgcggccccaagcgcgcagtgcccagcagccgcgccgagcctgacacgctgtcctctcccctcgcgcacagggctctgcgagtgacccggcgggcgagctccgtgctgcatggaacggctgcagaagcaaccacttacctcccccgggagcgtgagcccctcccgagattccagtgtgcctggctctccctccagcatcgtggccaagatggacaatcaggtgctgggctacaaggacctggctgccatccccaaggacaaggccatcctggacatcgagcggcccgacctcatgatctacgagcctcacttcacttattccctcctggaacacgtggagctgcctcgccagcgcgagcgctcgctgtcacccaaatccacatcccccccaccatccccagaggtgtgggcggacagccggtcgcctggaatcatctctcaggcctcggcccccagaaccactggaaccccccggaccagcctgccccatttccaccaccctgagacctcccgcccagattccaacatctacaagaagcctcccatctataagcagagagagtccgtgggaggcagccctcagaccaagcacctcatcgaggatctcatcatcgagtcatccaagtttcctgcagcccagcccccagaccccaaccagccagccaaaatcgaaaccgactactggccatgccccccgtctctggctgttgtggagacagaatggaggaagcggaaggcgtctcggaggggagcagaggaagaggaggaggaggaagatgacgactctggagaggagatgaaggctctcagggagcgtcagagagaggaactcagtaaggttacttccaacttgggaaagatgatcttgaaagaagagatggaaaagtcattgccgatccgaaggaaaacccgctctctgcctgaccggacacccttccatacctccttgcaccagggaacgtctaaatcttcctctctcccccgctatggcaggaccaccctgagccggctacagtccacagagttcagcccatcagggagtgagactggaagcccaggcctgcagaacggagagggccagagggggaggatggaccgggggaactccctgccctgtgtgctggagcagaagatctatccctatgaaatgctagtggtgaccaacaaggggcgaaccaagctgccaccgggggtggatcggatgcggcttgagaggcatctgtctgccgaggacttctcaagggtatttgccatgtcccctgaagagtttggcaagctggctctgtggaagcggaatgagctcaagaagaaggcctctctcttctgatggcccccacctgctccgggacggcccccttacccctgctgcttcagggtttttccccggcgggttgggaggggcaggaggtggggtggaaatagggtgggctcctttcctcaggtagagtggggggccaaaacctctgcagtccccggcagtgagctatggactttcttccccctcacgaggctgggggcctcctgctctcgtccctggccctccctgtacagggcaaagccagtctgggctctggcacacagagttcatgtttgccgccctctccctgcccctcaccccagaggtgagaggaatgaggggcattggtggttaggccggttggctgtcttgaacagctggagggaagatgcaggggtgggaagcggccaggcagaaagagctccaggctcttgtgtcgcccacccagccctcccatactcactcctgacagctttcctgcactgcagcttcctgctcctctgactctagtgggaacaggccccagctcagcctccgcgagggaggtcacccctccacttcagcttgccctgacctccgctcgcaaaccccgagcttccaagccttttgctccagccctgcggcttccccagaagcctgggcttagggtggagatgccgcctacccgatcctggccctccacctgcctccaggccacgaaatgggaattccagcactaagccaggcaccgggcagaagctgggccttccgcctcccttggatggggtcaagaggccaggcctggcacattttggagtgtcctggctaccagctctcacacctacacccacgcaccccctcacacactatgctctctcaagaatgtaatttattggggcccccccagctgctttcctcacctgcccctgccctaccttacacccccagcttgacttctttccagtccacgtggatataatgatatctatatttttgcccaggtctgggtattgctcctgcccagaccctgacatccctttccactgtgtgtgtgaccatgctgggggagggggactctgcttggaattaaaaggttgctttgggtcccta

SEQ ID NO: 1063 - DNA, 3396 bp, Homo sapiens
gcgctggccgctcgcggagggagaggctgcagagcgagggcaggaggactacttccagcaacccagtctcctgccatgtccgaccccatcacgctgaacgtcggggggaagctctatacaacctcactggcgaccctgaccagcttccctgactccatgctaggcgccatgttcagcgggaagatgcccaccaagagggacagccagggcaactgcttcattgaccgtgacggcaaagtgttccgctatatcctcaacttcctgcggacctcccaccttgacctgcctgaggacttccaggagatggggctgctccgcagggaggccgacttctaccaggtgcagcccctgattgaggccctgcaggagaaggaagtggagctctccaaggccgagaagaatgccatgctcaacatcacactgaaccagcgtgtgcagacggtccacttcactgtgcgcgaggcaccccagatctacagcctctcctcttccagcatggaggtcttcaacgccaacatcttcagcacctcctgcctcttcctcaagctccttggctctaagctcttctactgctccaatggcaatctctcctccatcaccagccacttgcaggaccccaaccacctgactctggactgggtggccaatgtggagggcctgccagaggaggagtacaccaagcagaacctcaagaggctctgggtggtgcccgccaacaagcagatcaacagcttccaggtcttcgtggaagaggtactgaaaatcgctctgagcgatggcttctgcatcgattcttctcacccacatgctctggattttatgaacaataagattattcgattaatacggtacaggtaaaaggaccccaacaacactggagatggggagtcccaagaagctcatgtcagccaggtcttggagggcatctcgccagtggtgcgaggcaggggactatactaatctgtattaattgtgtagcaggacttgattccccccatgatgaagtccaccttttggaatccagtgtcctctgaacagaaccaccttttttcttgccattttgagctgcagacaggcggtttattatgacaagtgaagagtcagctgatgtgtactaaaggaggccataggaggattttccagccaggacaaaagagcagcagttttctcctgggctccatctctctgtaccgctagccagtgccgcatttatccatctgtaagaaggccctggtggagaggatgggatgagaacaagaggctacctccagttaaccaggacataaagtccccagcggttcctgtcacacctgctcctccctccccagggtgcatccatgatcgtggatgtttgcccaggggtgaccatgtttggctggcttggaatgctgtgcattctcagagctctgttagtgtcccctcttgggggtcagagatgaggtgtggcagggtctagaggaatgagtgtccaggcagagttcagaaggtaggaatgtccctcttgatagggctgaatcaagggattcctggctttagaaagggtctgctatctttgcaaaaatgtgcaagtatctgtagccagtgtaatgaaatcacttccaaatccagcctgttacctgacttttgtcattgttttcccaaaaatttgaggtatcattgaaacaggtcattttaaacaaatctattacggattctcagggttggaaataattcgatgattgcttagtcctcccccacccctagaacaccccagcacatctgaagatgagcgcctctccctgggtacctgcaagtgatcaccttggcctgcttgcataccttggctgataggaagcgcgccatccccaaggcagctcctgctgaggttggacagtgctgactgttagagagttcttccctatattgagccaaaatctgtcctgccacttgctggatcttggttgcagaccttcccattcacccagttatatatctttgctttcaaaatagtcaccttgagagaccagacatttttctgaaaacatcattactcagaattcagattcccctctgggatctgtcttcagaatcaaagttagctcttttctatcccctgtaagtcagtccccttttgttgtagcttcacctcgttcgtgacccccacttcacccaccttccccaccatctgtggctccatatacctttcgaccattttctgctggaagaggaagattcacggcccctgaggagatccagaggaaagagacggtctccaagggtgctgtgcagcaaggagcccaggagtggtatgaaccgtaacagtgcccttagagtaaatgtgcggcccctaagaccctgccctcaggaaggcggccttcccctgcagtcctgtgtcccacccctgggtctctgtagggtgccatccagggcaagcaacccaagcactgcttcccaccgggtgatgagccatgcaggcctccaaactgcacgtcatgattcatccctaaagtgagtttggccttgagagtccccagggtcctcccccactgggcaggggtcctcaaagccaaggaagcctggtgacacaggcacccatgggaggtgggcccagaaaggggcttcccatagataggccctgtgagtagggagcttgtacactgggccatgggcagcgccagttcccttgagcagtaaaggcccttttccccctacggtgggacccaggagtctctctgacagcttttctgccaggcacagtggctcatgcctgtaatcccaacactctgggaggccgaggcgggaagatcacttgaggtcaggagttcaagaccagcctggccaacatggtgaaacgtcgtctctgctaaaaatacaaaaattagctgggtgtggtgacaggcgcctataaccccagctatttgggaggctgaggcagtagaatcgcttgaacccagatagcagaggttgcagtgagctgagagtgtgccattgcagagagactccatcccaaaaaaagacagctgtcccaggccaagggtacttgggagagcccctcatggagaacctagtttagaccaagtagcagaagctgtggtcataacaaaacaatttgaggaagaaatcttacaaatcaccactgccctttctccttttccataaaactgtccatcttttcggtgctccctaatccaagcagcttgactttagagaagttgcagaagcagtgaagccactaacatgctgtgtgactttatgcaagtcactcacctcactgagccacctccatttcttcatctgtgaaataggcataacagtaatacataaccctacctacctcacagggctgttgtgaggatcaaatgaaataatgtaacgtgagaatacagtataaatgataaaagaaaaaaaaaaaaaaaa

SEQ ID NO: 1064 - DNA, 3052 bp, Homo sapiens
caggaccatggaactcagcgtcctcctcttccttgcactcctcacaggactcttgctactcctggttcagcgccaccctaacacccatgaccgcctcccaccagggccccgccctctgccccttttgggaaaccttctgcagatggatagaagaggcctactcaaatcctttctgaggttccgagagaaatatggggacgtcttcacggtacacctgggaccgaggcccgtggtcatgctgtgtggagtagaggccatacgggaggcccttgtggacaaggctgaggccttctctggccggggaaaaatcgccatggtcgacccattcttccggggatatggtgtgatctttgccaatggaaaccgctggaaggtgcttcggcgattctctgtgaccactatgagggacttcgggatgggaaagcggagtgtggaggagcggattcaggaggaggctcagtgtctgatagaggagcttcggaaatccaagggggccctcatggaccccaccttcctcttccagtccattaccgccaacatcatctgctccatcgtctttggaaaacgattccactaccaagatcaagagttcctgaagatgctgaacttgttctaccagactttttcactcatcagctctgtattcggccagctgtttgagctcttctctggcttcttgaaatactttcctggggcacacaggcaagtttacaaaaacctgcaggaaatcaatgcttacattggccacagtgtggagaagcaccgtgaaaccctggaccccagcgcccccaaggacctcatcgacacctacctgctccacatggaaaaagagaaatccaacgcacacagtgaattcagccaccagaacctcaacctcaacacgctctcgctcttctttgctggcactgagaccaccagcaccactctccgctacggcttcctgctcatgctcaaataccctcatgttgcagagagagtctacagggagattgaacaggtgattggcccacatcgccctccagagcttcatgaccgagccaaaatgccatacacagaggcagtcatctatgagattcagagattttccgaccttctccccatgggtgtgccccacattgtcacccaacacaccagcttccgagggtacatcatccccaaggacacagaagtatttctcatcctgagcactgctctccatgacccacactactttgaaaaaccagacgccttcaatcctgaccactttctggatgccaatggggcactgaaaaagactgaagcttttatccccttctccttagggaagcggatttgtcttggtgaaggcatcgcccgtgcggaattgttcctcttcttcaccaccatcctccagaacttctccatggccagccccgtggccccagaagacatcgatctgacaccccaggagtgtggtgtgggcaaaatacccccaacataccagatccgcttcctgccccgctgaaggggctgagggaagggggtcaaaggattccagggtcattcagtgtccccgcctctgtagacaatggctctgactccccgcaacttcctgcctctgagagacctgctacaagccagcttccttcccctccatggcaccagttgtctgaggtcacattgcaagtgagtgcaggagtgagattatcgaaaattataatatacaaaatcatatatatatatatgttcttgttttttgagacagagtctcacactgttgcccaggctggagtgcagtggcgtgatctcggctcactgcaacctccacccccggggatcaagcaactctcctgcctcagcctccctagtagctgggattacaggcatgcactaccacgcttggctaatttttgtatttttagtagagatggggtttcactgtgtaggccaggctggtctcgaactcctgaactcaagtgattcacccaccttagcctcccaaagtgctgggattacaggcgtgagtcaccgtgcccagccatgtatatatataattttaaaaattaagctgaaattcacataacataaaattagctgttttaaagtgtaaaatttagtggcgtgtggttcattcacaaagctgtacaaccaccaccatctagttccaaacattttctttttttctgagatggagtctcactctgtcacccaggttcgagttcagtggtgccatctctgtccactgcaacctccacatcctgggttcaagtgattctcctgcctcagcctctggaggagctggtatcacaggcgtcccccaccacgcctggctaaattttgtatttttaggtggtcttgaactcctgatgtcaggtgattctcctagctccaaatgttttcattatctctcccccaacaaaacccatacctatcaagctgtcactccccataccccattctctttttcatctcggcccctgtcaatctggtttttgtcactatggacttaccaattctgaatatttcccataaacagaatcatacaatatttgattttttttttttttttgaaactaagccttgctctgtctcccaggctggagtgctatggtgcaatttttgttcactgcaacctctgccttccaagatcaagagattctccagtctcagctcccaagtagctgggattacaggcatgtactaccatgcctggctaattttcttgtagttttagtagggacatgttggccaggctggtggtgagctcctggcctcaggtgatccacccacctcagtgttccaaagtgctgatattacaggcataatatgtgatcttttgtgtctggttgctttcatgttgaatgctatttttgaggttcatgcctgttgtagaccacagtcacacactgctgtagtcttccccagtcctcattcccagctgcctcttcctactgcttccgtctatcaaaaagcccccttggcccaggttccctgagctgtgggattctgcactggtgctttggattccctgatatgttccttcaaatctgctgagaattaaataaacatctctaaagcctgacctccccacgtc

SEQ ID NO: 1065 - DNA, 473 bp, Homo sapiens
  modified_base (315)..(315): a, c, t or g
  modified_base (339)..(339): a, c, t or g
  modified_base (354)..(354): a, c, t or g
  modified_base (366)..(366): a, c, t or g
  modified_base (374)..(374): a, c, t or g
  modified_base (387)..(387): a, c, t or g
  modified_base (397)..(397): a, c, t or g
  modified_base (402)..(402): a, c, t or g
  modified_base (408)..(408): a, c, t or g
  modified_base (417)..(417): a, c, t or g
  modified_base (444)..(444): a, c, t or g
  modified_base (457)..(457): a, c, t or g
  modified_base (467)..(467): a, c, t or g
tgtctttcagaagagctttagtgtttccatatatagatcttatacatcttttgttagataaaagatctttgtatttttgttcctaaattcttcatacatttgtattgccattgtaaatgggatcttccattttctaattagttattggtggtacatgggaaaagtatttgaggtttgtgtgctgatttcttgattttgtagatagccactgtattgaattctcattacttccagtaaaatcttagttgattctcttagggcttctttgggctaacatttatcatttaatatgcaaataatgatagttttgtctcntcccttcccaatacttgctactcnttccctcccttcccntttgcccttttnccttgccntgcccttgccttnttttgccccnctcanggggcntggtggcanccggggtgggagagcagtgggggtgancccaggtcaatgnaaccacaaancccggg

SEQ ID NO: 1066 - DNA, 307 bp, Homo sapiens; identical to SEQ ID NO: 343
  modified_base (4)..(4): a, c, t or g
  modified_base (57)..(57): a, c, t or g
  modified_base (60)..(60): a, c, t or g
  modified_base (65)..(65): a, c, t or g
  modified_base (72)..(72): a, c, t or g
  modified_base (177)..(177): a, c, t or g
  modified_base (229)..(229): a, c, t or g
  modified_base (242)..(242): a, c, t or g
  modified_base (279)..(279): a, c, t or g
  modified_base (287)..(287): a, c, t or g
  modified_base (295)..(295): a, c, t or g

SEQ ID NO: 1067 - DNA, 2178 bp, Homo sapiens
attccagccacagcagcccctcagcgtcccccagtcacaccgtccccattgctgcttatctgtgcctttgtccatctacaatgcccttatttcactctgcctgtgggagtcctgtgaatctctccaaagccaactcagttcatctttctgcttgaaaccttccctgaataggccaggtgcggtggctcacgcctgtaatcccagcactttgggaggccaaggcaggcagatcacaaggtcaggagatggagaccatcctggctaacacagtggaaccccgtctctactaaaaatgcaaaaaattagctgggtgtggtggcgggcgtgtgtcgtcccagctacttgtgaggctgaagcaggagaatggcatgaacctgggaggtggagcatgcagccagccaagatcaggctgctgcactccagcctgggggacagagcgagactctgcctcaaaaaaaaaaaaaaaaaagaaagaaagaaacttccctgaatattccagccctcctgagcctagtccctttttgagatttgtccccatttcttggacaccatatgagagacttcagaggctgaagtgggaggattgcttgagcctgggaggtcgaggatgcagtgagctgtggtcataccactgcactctagcctgggcaacagagcgagaccttgtctcaaaaacagccaccaccaaaaactatcttgggatttgaataggattaccttaaatttgtagataaatttgagaattgacatctgtacgacattctagaacatggtatttcatgtcatgaattcatttcttgttaatgtctttcagaagagttttagggtttccatcatatagatcttacacatcttttgttagataacagatctttgtatttttgttcctaaatacttcagacatttgtattgccattgtaaatgggatctttcttccattttctagttagttattggtggtacatctgaaaagcatttgaggtttgtgtgctgctctcttgattttgtttctagccaccgtactgaattctcatattacttccagtaaaatcttagttgattctcttaggcttctttggctaacatttattattttatatgcaaataatgacagttttgtctcttccttttcaatacttacactctttccttcctttcctttcttttttttttctttctcagggccttgttgtcacccagactggagagcaatggtgtgatctagctcactgtaacctcaaactcctgggcttaagggatcctcctgcctcagcttcctgagtggctgggactacaggcaggcagtgaatttgaaaacttttgttgtagagacaagatcttgctatgttgcccaggctggttttcctgccactttagagcaggtttcctttttttcatacttttaagagttttttattaggaattgtccgctgaatgttagctaaaacagtcaataaaatgcgttaagtaccagctgcatgcaagaccctaagttagatacagtcagccctcttcatcagcaggtccacatcttcagattcaactagataaggctgaatatttgaagaaagaaacaataaaaatacaattagaaagtacagtataacaactgttgtcattatacaatatctatacattttattagtgatgacctaaagtacatgggaccaggcacggtgactcacacttgtaatcccaacactttgggaggccagcctgggcagcatagtgagaccttgtctttaataaaaataaaaataaaaaaattagctagtgtggtggtatgcacctgtagtcccagctactcaggaggctgaggtgggcagatcactggggcccaggaggttgcggctgctgtgagctgtgattgtgacactgctctccagcctgagtgacagagggtgatcctgtctctaagtaagtaaataaataaagtatatgggggggggtgtgttggttatatgcagacactgcaccattatacgtaaggtattgagcatccacagattctggtatggtgtgggggcgatatcctagaaccagtcctctgcaaggtagcaaggatgactgaactgtggaagaatcaaagcactgttaaacagcatacaattcctgtcttcaaaaaagttatctcatcgggtagatgagacttaaaatgaataaaaggaatgaatacac

SEQ ID NO: 1068 - DNA, 1827 bp, Homo sapiens
tttgtgcataacttggatgggctgaaggaggtgaggacagattggggaagggtggctttcattccaagatccagggatttggggaaaaggaaggaatttgatgttttttggggtgggaggggagggtgtgttttttacaccaaaaaaaaaaaaaaaatcaagagtatgcaagcatttctattcctcgcatttttctgtgtgcctggcaaataaatacctgtctcctacgaccctgagctgttagccctctctgttccatgacgggggccagatcttccagctcctcccagaaggagcacccaggctggcttcttcccactgaaagccctccccagcgaaccaacctcagttctatgcagtggctggggatcaggcatccagaccgaagtcacctctgcctgctccagcttgggtcagctgggtctgaccagggggccagatccgagccgcacctgccggcccccagccccagctccagctcctgacctctcccagcctggcctggctgttcctccagggctgatggctgtcaacccatccttgtgagttcatatggactgctgcccctcgaaagggagagggtcggccccatgtccccagggagcattccatcagggacaacgtacatactgtgatgtaaactttttttttccccccagggggcaaaagtgtgagatgccttaatctttccttcatttctgctgtctcgaacactctagcccattatttcctttcagttccttgcagcataacctctacgataagccccaagcgggttgttgtattatgacgtttatgatgttccaggtgaaggcattattaagtacctctctgggtgtggggtttggacgcaccaggatagctattgattaatgttaagggtgttctacccacagcaaagcacaccctcttaaaccaggcactgcctgggtcctggtcccgagagccctaccaggatcaggttcctgcaagccgtcagaatgtgggagcccccagcccaactgattgtaactgtcccctgttacctgtgacatgaacctccaacagcatctggaaacggttccctctgtcagctgctctgtagacagggctggggagatctcagagttcacacctcgcctgttgtaggggaggttgggggtagggtttggaatggccaagtgcccttggaacctcccacagctatggccgtcctgacctcatcccaggaactctacggtgaccaggaaccacccctctgacgaggtctgtagcggcccttctcagagtggaacagcccacagtgctagttgtgcctggtcttacctgtactccacggacctcggtgaagcaaaagcttcagggcagagggaatgaggcaacccagtggcagccccgctgggccccgtggctcccgctctcctattggacgtagaggcaggggagagacctctatacaaatattctcatcacagaagggatgatccttgctgctctgccgtagggtttttgatgctgagctatgctgcacatgacgttaacctaaagaacttggactgagcttttaaaaaaggacagcaaacaattttataatccttaaagtgtaatagacggttacactagtgcagggtattgggggggctctttgggtgtggaggctgtcacttgtatttattgtgactctaaatctttgatagtaaaacaaatgtaaaaagaaatgtttgccaccagatgggaatagaagttccaataagcaggctggaatgggtggctatacgttgtatcacgaggaagttttagactctgaaggataataaatggatgatgtgtcaaaaaaaaaaaaaaaaa

SEQ ID NO: 1069 - DNA, 739 bp, Homo sapiens
  modified_base (4)..(4): a, c, t or g
  modified_base (13)..(13): a, c, t or g
  modified_base (16)..(16): a, c, t or g
  modified_base (21)..(21): a, c, t or g
  modified_base (56)..(56): a, c, t or g
attnggccctcgnggnccagnaattcggaacgaggggaggttgcagtgaaccaagnattgcgcctgggcaactgagcgagactccccatctcaaaaaaaaaaaaagaaaaagaaaattgaggactctggagccagattacctgtatacagatgtagattttacctgtgcttgcttctctgacaaatgacctaaccccttgacaaatgacctctttttctccatctgtagtatggggatagtaggcaccgtttcatagagttgttataatgatgaaatgatgaaaagtcatgtaatgttgtagcacaatgcctcagcctcccaagtagctgggactacaggcttgcaccaccatgcccagctaattattttattttatttttagtagagacgagatttcaccatgttggccaggatggtctcgatcccttgacctcatgatccgcccgcctcggcctcccaaagtgctgggatagagttgatttttgtgaggcaaggcagggctccaccttctttttctggtatgtgcatatccagttttcccagcagacgttgttgaaaactgctttcccctttgaatggtcttggcccccttgtggagagtcactgcagcataagagttagccttcatctctgggctctcctctcctgtgactcccgtaatgttttactcatccacttcatggtggaccaccctctggctctgtccactctgccacttttttcctctgctcctcacag

SEQ ID NO: 1070 - DNA, 2979 bp, Homo sapiens
agcaaaccaatcgcaagcctcgttgagtggaaggggtgggatcttccccggaagttttggttaaagcccctccaatcagcggctcggtgcggcaagtttgaatttcgtggaggctcgggttgtgagggttcctgcttcggagtcggcggtggtcgtccagaccgagtgttctttactttttgtttggttgaggtttcacgctagaaggtggctcaggatgtcttcatcacattttgccagtcgacacaggaaggatataagtactgaaatgattagaactaaaattgctcataggaaatcactgtctcagaaagaaaatagacataaggaatacgaacgaaatagacactttggtttgaaagatgtaaacattccaaccttggaaggtagaattcttgttgaattagatgagacatctcaagagcttgttccagaaaagaccaatgttaagccaagggcaatgaaaactattctaggtgatcaacgaaaacagatgctccaaaaatacaaagaagaaaagcaacttcaaaaattgaaagagcagagagagaaagctaaacgaggaatatttaaagtgggtcgttatagacctgatatgccttgttttcttttatcaaaccagaatgctgtgaaagctgagccaaaaaaggctattccatcttctgtacggattacaaggtcaaaggccaaagaccaaatggagcagactaagattgataacgagagtgatgttcgagcaatccgacctggtccaagacaaacttctgaaaagaaagtgtcagacaaagagaaaaaagttgtgcagcctgtaatgcccacgtcgttgagaatgactcgatcagctactcaagcagcaaagcaggttcccagaacagtctcatctaccacagcaagaaagccagtcacaagagctgctaatgaaaacgaaccagaaggaaaggtgccaagtaaaggaagacctgccaaaaatgtagaaacaaaacccgacaagggtatttcttgtaaagtcgatagtgaagaaaatactttgaattcacaaactaatgcaacaagtggaatgaatccagatggagtcttatcaaaaatggaaaacttacctgagataaatactgcaaaaataaaagggaagaattccttcgcacctaaggattttatgtttcagccactggatggtctgaagacctatcaagtaacacctatgactcccagaagtgccaatgcttttttgacacccagttacacctggactcctttaaaaacagaagttgatgagtctcaagcaacaaaagaaattttggcacaaaaatgtaaaacttactctaccaagacaatacagcaagattcaaataaattgccatgtcctttgggtcctctaactgtttggcatgaagaacatgttttaaataaaaatgaagctactactaaaaatttaaatggccttccaataaaagaagtcccatcacttgaaagaaatgaaggtcgaattgctcagccccaccatggtgtgccatatttcagaaatatcctccagtcagaaactgagaaattaacttcacattgcttcgagtgggacaggaaacttgaattggacattccagatgatgctaaagatcttattcgcacagcagttggtcaaacaagactccttatgaaggaaaggtttaaacagtttgaaggactggttgatgattgtgaatataaacgaggtataaaggagactacctgtacagatctggatggattttgggatatggttagttttcagatagaagatgtaatccacaaattcaacaatctgatcaaacttgaggaatctgggtggcaagtcaataataatatgaatcataatatgaacaaaaatgtctttaggaaaaaagttgtctcaggtatagcaagtaaaccaaaacaggatgatgctggaagaattgcagcgagaaatcgcctagctgccataaaaaatgcaatgagagagagaattaggcaggaagaatgtgctgaaacagcagtttctgtgataccaaaggaagttgataaaatagtgttcgatgctggatttttcagagttgaaagtcctgttaaattattctcaggactttctgtctcttctgaaggcccttctcaaagacttggaacacctaagtctgtcaacaaagctgtatctcagagtagaaatgagatgggcattccacaacaaactacatcaccagaaaatgccggtcctcagaatacgaaaagtgaacatgtgaagaagactttgtttttgagtattcctgaaagcaggagcagcatagaagatgctcagtgtcctggattaccagatttaattgaagaaaaccatgttgtaaataagacagacttgaaggtggattgtttatccagtgagagaatgagtttgcctcttcttgctggtggagtagcagatgatattaatactaacaaaaaagaaggaatttcagatgttgtggaaggaatggaactgaattcttcaattacatcacaggatgttttgatgagtagccctgaaaaaaatacagcttcacaaaatagcatcttagaagaaggggaaactaaaatttctcagtcagaactatttgataataaaagtctcactactgaatgccaccttcttgattcaccaggtctaaactgcagtaatccatttactcagctggagaggagacatcaagaacatgccagacacatttcttttggtggtaacctgattactttttcacctctacaaccaggagaattttgaatttaaaaataaatccaaacattttccttcatattatcaatgcttatatattccttagactattgaaattttggagaaaatgtatttgtgttcacttctatagcatataatgttttaatattctgtgttcatcaaagtgtattttagatatactctttctcaagggaagtggggatattttgtacattttcaacacagaataaaaaatgtactgtgccttg

SEQ ID NO: 1071 - DNA, 4595 bp, Homo sapiens
agcgggagggggctccgggcgccgcgcagcagacctgctccggccgcgcgcctcgccgctgtcctccgggagcggcagcagtagcccgggcggcgagggctgggggttcctcgagactctcagaggggcgcctcccatcggcgcccaccaccccaacctgttcctcgcgcgccactgcgctgcgccccaggacccgctgcccaacatggattttctcctggcgctggtgctggtatcctcgctctacctgcaggcggccgccgagttcgacgggaggtggcccaggcaaatagtgtcatcgattggcctatgtcgttatggtgggaggattgactgctgctggggctgggctcgccagtcttggggacagtgtcagcctgtgtgccaaccacgatgcaaacatggtgaatgtatcgggccaaacaagtgcaagtgtcatcctggttatgctggaaaaacctgtaatcaagatctaaatgagtgtggcctgaagccccggccctgtaagcacaggtgcatgaacacttacggcagctacaagtgctactgtctcaacggatatatgctcatgccggatggttcctgctcaagtgccctgacctgctccatggcaaactgtcagtatggctgtgatgttgttaaaggacaaatacggtgccagtgcccatcccctggcctgcagctggctcctgatgggaggacctgtgtagatgttgatgaatgtgctacaggaagagcctcctgccctagatttaggcaatgtgtcaacacttttgggagctacatctgcaagtgtcataaaggcttcgatctcatgtatattggaggcaaatatcaatgtcatgacatagacgaatgctcacttggtcagtatcagtgcagcagctttgctcgatgttataacatacgtgggtcctacaagtgcaaatgtaaagaaggataccagggtgatggactgacttgtgtgtatatcccaaaagttatgattgaaccttcaggtccaattcatgtaccaaagggaaatggtaccattttaaagggtgacacaggaaataataattggattcctgatgttggaagtacttggtggcctccgaagacaccatatattcctcctatcattaccaacaggcctacttctaagccaacaacaagacctacaccaaagccaacaccaattcctactccaccaccaccaccacccctgccaacagagctcagaacacctctaccacctacaaccccagaaaggccaaccaccggactgacaactatagcaccagctgccagtacacctccaggagggattacagttgacaacagggtacagacagaccctcagaaacccagaggagatgtgttcattccacggcaaccttcaaatgacttgtttgaaatatttgaaatagaaagaggagtcagtgcagacgatgaagcaaaggatgatccaggtgttctggtacacagttgtaattttgaccatggactttgtggatggatcagggagaaagacaatgacttgcactgggaaccaatcagggacccagcaggtggacaatatctgacagtgtcggcagccaaagccccagggggaaaagctgcacgcttggtgctacctctcggccgcctcatgcattcaggggacctgtgcctgtcattcaggcacaaggtgacggggctgcactctggcacactccaggtgtttgtgagaaaacacggtgcccacggagcagccctgtggggaagaaatggtggccatggctggaggcaaacacagatcaccttgcgaggggctgacatcaagagcgtcgtcttcaaaggtgaaaaaaggcgtggtcacactggggagattggattagatgatgtgagcttgaaaaaaggccactgctctgaagaacgctaacaactccagaactaacaatgaactcctatgttgctctatcctctttttccaattctcatcttctctcctcttctcccttttatcaggcctaggagaagagtgggtcagtgggtcagaaggaagtctatttggtgacccaggtttttctggcctgcttttgtgcaatcccaatgaacagtgataccctccttgaaatacaggggcatcgcagacacatcaaagccatctgtgggtgttgccttccatcctgtgtctctttcaggaaggcattcagcatgcgtgagccataccatcctccatcctgattacaaggtgctccttgtagcaaattatgagagtgagttacgggagcagtttttaaaagaaatctttgcagatggctatgatgttatgtgttcggtgttgtaccatgagtagtattgacttcccttgagatatgatgtacaatgtgcttgtgaaattgacttaccctcttcacttaagttagttctggcctgacctgaactctgacttttactgccattcactttataaaataagggtgtgtaacatatcaagatacatttatttttatctgttttttttttcctgttaaagacaattatgtagagtgggcacgtaatccctccttagtagtattgtgttttgtgtaaatgtgctattgatattaagtatttacatgttccaaatatttacagactctagttgcaaggtaaagggcagcttgtgatctcaaaaaaatacatggtgaaatgtcatccagttccatgaccttatattggcagcagtaggaaattggcagaagtgttgggttgtggtaacggagtgatgaatttttttttaatggccttgagtttgatctctgcaaaggataggaaacctttaggaagacaagaaactgcagttaatttagaactgtcactgtttcaagttacactttaaaaccacagcttttaccatcataacatggctctggtaatatgtaggaagctttataaaagttttggttgattcagaaaaaggatcctgttgcagagtgagaggaagcatagggggaaactccattggaacagattttcacacaacgttttaaattgatataagtttaggcagttgtagttcataacttatgttgctcatgttgtgctgtgtcaggatgggataggaagcaagtcccatgcttagaggcatgggatgtgttggaacgggatttacacacactggaggagcagggcaagttggaattctaagatccatgaacccccaactgtatttcctccctgcatattttaccaatatattaaaaaacaatgtaacttttaaaaggcatcattcctgaggtttgtcttaatttctgattaagtaatcagaatattttctgctatttttgccaggaatcacaaagatgattaaagggttggaaaaaaagatctatgatggaaaattaaaggaactgggattattgagcctggagaagagaagactgaggggcaaaccattgatggttttcaagtatatgaagggttggcacagagagggtggcgaccagctgttctccatatgcactaagaatagaacaagaggaaactggcttagactagagtataagggagcatttcttggcaggggccattgttagaatacttcataaaaaaagaagtgtgaaaatctcagtatctctctctctttctaaaaaattagataaaaatttgtctatttaagatggttaaagatgttcttacccaaggaaaagtaacaaattatagaatttcccaaaagatgttttgatcctactagtagtatgcagtgaaaatctttagaactaaataatttggacaaggcttaatttaggcatttccctcttgacctcctaatggagagggattgaaaggggaagagcccaccaaatgctgagctcactgaaatatctctcccttatggcaatcctagcagtattaaagaaaaaaggaaactatttattccaaatgagagtatgatggacagatattttagtatctcagtaatgtcctagtgtggcggtggttttcaatgtttcttcatgttaaaggtataagcctttcatttgttcaatggatgatgtttcagatttttttttttttaagagatccttcaaggaacacagttcagagagattttcatcgggtgcattctctctgcttcgtgtgtgacaagttatcttggctgctgagaaagagtgccctgccccacaccggcagacctttccttcacctcatcagtatgattcagtttctcttatcaattggactctcccaggttccacagaacagtaatattttttgaacaataggtacaatagaaggtcttctgtcatttaacctggtaaaggcagggctggagggggaaaataaatcattaagcctttgagtaacggcagaatatatggctgtagatccatttttaatggttcatttcctttatggtcatataactgcacagctgaagatgaaaggggaaaataaatgaaaattttacttttcgatgccaatgatacattgcactaaactgatggaagaagttatccaaagtactgtataacatcttgtttattatttaatgttttctaaaataaaaaatgttagtggttttccaaatggcctaataaaaacaattatttgtaaataaaaacactgttagtaataaaaaaaaaaaa

SEQ ID NO: 1072 - DNA, 1278 bp, Homo sapiens
agaagttactttgaaataaattgaaggattagcagtggtgactgaggaataaaaattataatttaaaattgtccttaaagctggaattcttaacttattgaccttatatcctacatattataggactttgtaaatttaggctgatatggaaatgtatatttatatcaaatttaaatttttagaatgatggtgctactatattctaattgttaatttgataattgtaattgtaatttgttaatttgttctaataatgttttcatgacattattcatttgctgcttggcttgatggcataacaagtatgggttatttaccctgaaaaggaaacagtatcacccttccagaatctctatttacagctacagaagatgcaacacacctgtttctggaccacttccagatcagatgtgatgcatgctttagatcatttactttgatctaggaattactgtctggcatttcgtggtgtagggtaggtgtctccagcactgtataggtgtctggaattgagataagaatcaatttcaatacaaaatacattttttgcttaaagcacgcaaggattctatgaattcaggtaaattcacagggtggaaaacaggaactaatgttatatattcctgtagttatcttcataatgaagcagaaagaaaaacaaaaaagttacaaaaataaatgaaaagaactgtattttctagaattgaaaaataattcttttagatgatagataagatgtttacatcaacctgcaaaaagtcaatgttgaagaggtctcattgtatctcacagaattttgatttgcctactcacccacaggagacatttctgggacagtagcaacataaggtccatcccaaaactttggctcattatcattaatatcctgcactttgatgatgaattctgattcaggctccaggggctttctggtttctatgtccacagcctgagcacgaagagtgtagaaaggtttttcttctctatctaggctccttattgcatgaatgtcccctgtggtttcatcaatggtaaaaacggtgccagcgccatctcctgagagggtgtatttcgcagtgccctttcccttgtctaagtcggaatggagctttagggaagagagggagagagagaggaagagaaagagaaggacaaagaaagaacaccattaaaaggatgttgccaaattaaaaagtcataatttgcaatacaattcctttaatcaaaaatgttaaataaaaatcttatggttctgttaaaaaaaaaaaaaaaaaaaaa

SEQ ID NO: 1073 - DNA, 5763 bp, Homo sapiens
gcgcaaggcacctgctggcaatggcaggaggcggacgtggggggtcgtgcagtaggtactggagggagagacgtgggcacaaaggtcgcgggaggaacaggtgcccacaatggctgcatatttgcccgtggatcactgaagattcctgctctcctgctgaggtggagactgcagtgagctgagatcgcaccattgcactccagcctgggcaacgagtgcaaaactcagtctccagataaaaaaaagaaaaagaaaaaaaagaggccgggtgtggtggcttatgcctatgatcctagcactttgggaggtcggggtggacggatcacgagatcaggagttggaggccagcctggccaacatagtgaaagcccgtctctagtaaaaatacaaaatttagtcagacatggtgggcaggagagagcatgtgcaggggaacatccatttataaaaccatcagacctcatgagacttattcactaccatgagaacagcatgggggaaactgcctccatgattcagttatctccacctggccccacccttgacacatgggaattgttacaattcaagatgagatttgggtgcggacagagccaaaccatataattcttccccggcccctcccaaatctcatgtcctcatatttcaaaagcaatcatgccttcccctaagtcccccaaactcttatttcagcattaactcaaaattccatagtccaaagtctcatctgagacaaggcaagtcccttccacctatgagcctgtaaaatcaaaagcaagttagttattttctagatacacagggatacaggcattgggtaaatacactcgtttcaaatgggagaaattggccaaagcgaaagagctacaggccccatgcaagtccaaaacccagcaggcaaatcttaaagctccaaaatgacctcctttgactccatgtgtcacatctaggtgatgcaagaagtgggttcccagggtcttgggcagccccgcccctgtggctttgcagggtacagccccccttctggctgcattgagtgtctgcagcttttccaggcacacagtgcaagctgtcagtggatctaccattctggggtctggaggatggtggcccttttctcacagctctgcttggcagtaccccagtggggactctgtgtgggagctccaaccccatatttccctttgacactgtcctagcagaggttatccatgagggcccccccctcccctcccccccacagcaaacttttgcctggatttccaggcattttcatacatcttctgaaatgtaggcggaggttcatgaacgttaattcttgactttggtgcatctgcaggcttaacaccacctagaacctgaaaggcttggaacttgcaccctctgaagccatggcctgaggtgtaccttggccccttttacctatggcaggagcagctgggatgcagggccccaagttcctaggctgcacacagcagggggttctggacccacaaaaccatttttccttctaagcctcctggcctgtgatgggagggtctgctgtgagggtctctaacatgccctggagacatttgccccattgtcttggtgattaacatttggctcctcattacttatgcaaatttctacaacccagtctcctgagaaaatagatttttcttttctgttgcatcatcaggctacaaattttctgaacttttatgctctgcttcttctcgaatgctttgctgcttagaaatttcttctgtcagataccttcaatcatctctctcaagttcaaagttccacagatctgtagggaactctagaaagaaattcttattttccctctttcccgcctatcttatgcccgtttctaatacaggtgcacaatgcctgcagtgtctttgcatagtaagagtgactttactccatttcccaacaaattcctcatctccctctgagaccacctccgcctggaccttgttgtccatatcactattaacattttggtcaaagccattcaacaagtctctaggaagttccaaactttcccacattttcctatcctcttctgagccttccaaactgttccagcctctccctgttacccatttccaaagttgcttccacattttcgggtatctttacagcagcaccccactctactggtatcaacttattgtattagtctgttctcacaccgcaaataaagacatacctgagactgggtaatttataaaggaaagaggttgaattgactcacagttctgcatggctggggaggcctcacaatcatggtggaaggcaaggaggtgcaaaagcatgtctcacatagtggcaggcaggagagagcatgtgcaggggagctcccatttataaaaccatcagatctcatgagacttagtcactaccgcgagaacagtatggggggaaccatccccatgattcagttatctgcacccggccccacccttgacacgtgggaattattacaatgcaagggctggtgaattaccagatctccgtcaagtgcagtaaccagttcaagttggaagtgtgtcttttgaatgcagaaaacaaagtcgtggacaaccaggctgggacccagggccagctgaaggtgctgggtgccaacctctggtggccgtacctgatgcacgaacaccccgcctacctgtactcgtgggaggatggtgattgctcacaccaaagccttggacccctcccagcctgtgacctttgtgaccaactccacctacgcagcagacaagggggctctgtatgtggatgtgatccgtgtgaacagctactactcttggtatcgcaactacgggcacctggagttgattcagctgcagctggccgcccagtttgagaattggtgtaagacatcacaatcccattattcagagcgcgtatggagtggaaacgcttgtagggtttcaccaggatccacctctgatgttcagtgaagaggaccggaaaagtctgctagagcagtaccatctgggtctggatcaaaaacgcagaaaatacgtggttggagagctcatctggaattttgccgatttcatgactaaccagtccaaggatgaaggaaaaactggacctcattatggatttacttttgggatacactcattattccagaggagggtaaaaggctgagaagcttaagacttgctataattctgtgagagagctataaaagtctgctcagaaacattataacgtaaaatggacagagaaggacaatgagatatttaatttgccacggcaaagccattgctgtgaagaatggataatatatgtcaatggtaatatatgaagaaataacacagatggagctggcttgaaatcctcttgtttatggcagtacatatcgtttatgattcaaaaaatatagcccatttccaaaaacctgcaacaaagagatactttctcaggtgtcagtttcttggtcgggaatgaaaatagtgccaacctgtgataccttcactctaattttactttctgaggaagttttctgtaatagttatttggtgataattattaatactggtgagaaaatcaatgtaaaagaggagaaataacccacacaaccacatacaactaggaaatgatagatggatctgaaaaaaaaggatatgcactcttaacaagttcaacacccaagtactattgcaagtaccagctgtatttcatggaaaaaaaaaaaagaataactcaaaaggcagaacgaagagcctagaggtcagagatgagaggcatgaataattattcacaggcgttgaatataatcaaatgacttgcaacatttaccactgggattttaaaatgtggtggaccaatcattcttttagtctgtgcattttcccatttttttcaacaggaatgtctagagacattattcctgttttgccactgtatttttggtgaatgtgtagtaagtaactggcctctttagtatcacaaagctggatgaagaaaatgtggtacatatacaccatgaaatactatgccgccacaaaaaggaaatgagatcatgtcctctgcagggacatggatgaagctggaagccattatccttagcaaagtaacgcaggaacagaaaaccaaacaccacatgttgtctcttagaagtgggagctgaacgatgggctttgcagagattaaagcttcagaaaaaaatatgggaaaatatgttaaaatgttgacctgaaaatgaagtggatgactataaaactcttgagagaattagactttttgtagcagtttattacatgataataccttaaaggagatcacattcagtgacctgcgttgacagatgtgaatttcttcggagtaagaaatcctcagaggaaattacccagtatattcaaagctacaagggatttgttgacataacggtaatgtataacagcaatttttttctcaagtttttggattacctgtaagtgtctgactcagaagggcataggcattctttttatgtcatgggtttgatttctttcttcctttctcctttcattcccctggctcccatcttcaaagtgaaaaatatcacattcacttgctgacctagagcctttttctttttccagggctggcttctgacgggctctgcttgccttcctgatagtcttcccctttatgaatgaagccacttgccccagcttccctctgctgcccctatctgcaggcttgctaagatctcctgacctaggcgctgtcacccacagtgggctgcagagctggctcttcctagctggctaactatcctgaatcagtaaaaatttcctagtggagagtgatgggaaatcgaatccaaactggcttaaacaaaaatgagaatttattgattaacatgactcaggagaccagaactctatagagaacatggcctgacagtgggggaagagaggtgtttcctcaaaaagaaactgggtgcagctttcccagaagaatcagttgctcaatatataataccctgatgaatttagttaccattctatgtctcttacttcctcattcgtcaaagtacatctgtgatatttaaatgcaggtctgttttcaaggtcagtttccggaaacagtgaccctgagaaggcttcctcctgagtatgcataaacattcacagcttgcatgcgtgtgtgtgtgtgtgtgtgtgtgtgtgtgtatgtttgcttgcactgcataaaaacaattgcaacatcaacagaaataaaaattaaaggaataattctcctccgactctgccgttccatccagtgaaactcttcattctggggtaaagttccttcagttcttgttcatagataggtatatacttcataagtcaaacaatcaggctgggcgcagtagctcatgcctgtaatcccagccctttgggaggccgagctgggcagatcacttgagatcaggtgttcgagaccagcctcaagacctccaacatgggccgggtgcagtggctcacgtctgtaatcccagcactttgggaggccgagacggacggatgatgaggtcaggagatagagaccatcctggctaacatggtgaaaccccatctctactaaaaatacaaaaaaaaaaaaaaattagcccggcatggtggcaggcgcctgtggtcccagctactcgggaggctgaggcaggagaatggcgtgaacctgggaggcagagcttgtagtgagccaagtgccactgtgctccagcctggacgacagagcgagactctgtctcaaaaaaaaaaaaaaagaaaaaaaaaaaaaaaa

SEQ ID NO: 1074 - DNA, 2584 bp, Homo sapiens
cttttagtgagagtaactgccaaaatatcaaaagatcctttaattatcaggtatttgaatccaggagttctctgcttaaaaagaataccagttaccagactattgtatgagtatttaaaaaatcaggaaaagcagcaaaaacagatttcaaagttattatattcattttaaaaaagtagattcttgaaattaatattagtggaaagcaatatttcaaactacacccatttcatttatagtatatgacgaattatgtagccacggctggccttagggaaacttggggcgtaggtagttctttctggtgttctgcttggctgtgttgtcaggaggtttctttttctcagtctcctagggttgcccacggctttctgtcagtctggtggcttacaaggcttcacactctctatcctcttccagaaccaagcctttctctttcctccctttcttttaatatataacatctgcatctagaaaaatgtccttgcatttgatagcacaatagattaaatgagatacaaattggaaataaacaggtagtcttggtgggaaactctttttaggtaggagtatcattcccagggccttagatcaagatctagaagctataaagggttatagtggtgttgtagaactttgtctttagttgagctaaaaacggggttctcgtcacacaaccatgacaaattaggctcacagacactttgaagggtgaccaggacagggtttattggatgaaaagggaaagaaggactatcagcaaagcgagaagccggctagccagttttccacctcgcacactgaattccaggttactatgctgcaacaggagaggccaggctcctccccactgcaaaaggcgtgaacttcctgaggctccaccccagtgcgcattcctcccagtgctcaggcctgtgggagcttctgccagggagccctttttacttggctgtctcagtagtagtgacagtgatgttaatagtatgttcgtggttcctcaagcacactagcattttccttagatagagccctcgtaatattttctctccttgaaacactaacctattctccttttgccattgtcccgtgtgcctcgcggtattagcattgtggacactgaaacctagtctaaactagcacaagcaaagggattttcttgactcacaaaatgaaagtccaggagcatattaggccttaagcacagatagatccagggctgaaaccatgtctcatgtcagcaggacactcttactatcttaaaatctcaactctgattttctctcttctcatctcattccttttctttttctaacatttattttaagttctggggtacaagtgcaggtttgttacacaggtaaacttttgtaacggaggtctgttgtacagattatttcatagcccaggtattaagcctcgtgcccattaggtgtttttactgatcctctccctccttccatgctccaccctccaaaaggccccagtgcgtgttgttgccctctatgtgtccgtgtgttttcatcatttaactcccacttataagtgaaaacatgttaagtatttcatgttagtttgctcaggataatggcttccaactccatccatgtccctgcaaaggacataatgtcgttcttttttattggcctaattcttaggcagtcttttctggaattgtgacagaaaaggttcaaagcagttatttttttttcatattatatccatagttgtgtttttattgcaaagagcacgcctcttactggatacctcctatcactattgatagggaaataaggtcatctcattgactagcgatgaagcctgttaggttaccccctgtttggagtaggcagagggatcagttcacaagaatcttttggagcagattcattttaaaacataaaaaattatgttaatagaaaggtgaacaaaaagcatatttgagaggcaaaactatggctactactgtttgtgacaaaaattatcaaaagttatacttacatatgggtttctgtctgtcttctcacctatagctctgtgaaaaataagtgttgctcactgctgagtactcttacaagtgtgactggctggggctggtgttgccggtggtaaaggaatttaccaagacagttgtagggggagaaaaataaaggcacatttattagagaaagtatgaaaattcattgcaagggtgcaatatgtagcactacagagaaggggctgtctgcaaagaggcaggggctggagggaagttttataaggtcttctggagggggctacatgctgatcgaggttgtgccatttgggctacctgtggagcaaggtcgttgtgtcagcgcgttgtttatggttacttgtctctcagaacaattgttctctcctaccttgggcccctccctggtggttatcaagactccacaaatatccagtgcctcttgcgctttaggatatatattaagaagtcactggctgtgcacggtggctcacgcccgtaatcccagtactttgggaggcagaggctggcggatcgcttgagttcagaagttggggaacagcgtgggcaacatggcggaaatcccgtctctac

SEQ ID NO: 1075 - DNA, 2740 bp, Homo sapiens
ctgggacccacgacgacagaaggcgccgatggccgcgcctgctgagccctgcgcggggcagggggtctggaaccagacagagcctgaacctgccgccaccagcctgctgagcctgtgcttcctgagaacagcaggggtctgggtaccccccatgtacctctgggtccttggtcccatctacctcctcttcatccaccaccatggccggggctacctccggatgttccccactcttcaaagccaagatggtgcttggattcgccctcatagtcctgtgtacctccagcgtggctgtcgctctttggaaaatccaacagggaacgcctgaggccccagaattcctcattcatcctactgtgtggctcaccacgatgagcttcgcagtgttcctgattcacaccaagaggaaaaagggagtccagtcatctggagtgctgtttggttactggcttctctgctttgtcttgccagctaccaacgctgcccagcaggcctccggagcgggcttccagagcgaccctgtccgccacctgtccacctacctatgcctgtctctggtggtggcacagtttgtgctgtcctgcctggcggatcaaccccccttcttccctgaagacccccagcagtctaacccctgtccagagactggggcagccttcccctccaaagccacgttctggtgggtttctggcctggtctggaggggatacaggaggccactgagaccaaaagacctctggtcgcttgggagagaaaactcctcagaagaacttgtttcccggcttgaaaaggagtggatgaggaaccgcagtgcagcccgggggcacaacaaggcaatagcatttaaaaggaaaggcggcagtggcatggaggctccagagactgagcccttcctacggcaagaagggagccagtggcgcccactgctgaaggccatctggcaggtgttccattctaccttcctcctggggaccctcagcctcgtcatcagtgatgtcttcaggttcactgtccccaagctgctcagccttttcctggagtttattggtgatcccaagcctccagcctggaagggctacctcctcgccgtgctgatgttcctctcggcctgcctgcaaacgctgtttgagcagcagaacatgtacaggctcaaggtgctgtagatgaggctgcggtcggccatcactggcctggtgtacagaaaggcatccacagcatatctgaagaaatattcagaagttaactaatctcagatgatttcagcaggagtaaagaagagaaacagactcagaaatgccattacaacagttaattatgtcaaatttatcaccctgattgatcacgcagcattaacctcaagaacgccaagccaagtttttttgacaaatgtgagccaaggtttccgaaaaactagcagatatgactgtgacttacaaaatggaaaaagtaaacgagaaacacaatttgatatgatttaataaaagatttgtttccaccacttctcctgggaacctcagcacattttctttccactgacagttattatctctacctttattgaacaaagacacccggaacacagctgctgaggatcagtaaagaaaatcattcttttattaataagactgttattagcaggaaaaaaaaatccatgtttgggagtttgcactgaagttacaggccattttgaagaaatatggctgactagtgccaacattatttcaggcaatttcatgatcaaatgtcttattaggttgtttaaaatttttatagagattgtaaatcagaactattttctatttgccctaaatatttagatgctacagggaaagcagatcaaattaaagggtactgtgcacatttttttactgggaactcccagggatataaatcatttcgcctgcagcatggaattcttcagtacacatgcttgtggaaacattccacgctccgccagcacgctcattaaagtgatgatttgggttgcaacaacagtgccaagtacttcctgtgttcaactggggaccatgtggcaagacccaaagcttccccagagatcctatgggaataagttttttgagccaccatattccattatttcagcctaaaataacaccatgggacaagaatcagaagacagaggagcagacaaatgtgtgtagacatgctggaaggaatctttctttttagaaacagggtcaatatctattaaactttaagatgtgtatctcttgacctggcagtttctgtatttgagttttaacctactgatatacccatgcatgtgaataaagtatcttcctgcatgtaacaggatatttaatgtaaccttgattatagttgcaaatgctgggaaacgatccaaatgtctttcaatatggcactgattaaataaattatggcacagtctcacaatgaaaaacaaatgtagccattaaacagaatgaaatgggtctagctaaattgaaataggactacctctaagatatgttgttaaaaagaaaaaaaagaaagtgcagaggaacaagtatgataccattttgtattttttaacatatgcaagcgtgattgtgcccacacagaatacctttgaaaataaactcagtatttgcctcagtggataaaaacaagaaccagccttattttcactgttatatcttttggtgccactttttgaactttttaccatatgtgcatatgtaactttctaaataaattttgtaaaaaaaaaaaaaaaaaa

SEQ ID NO: 1076 - DNA, 5591 bp, Homo sapiens
ggagcaagggcagccccaggacaaccattacctccacatggaaaacctcttggaaaactaaactctactgatctcaaggatgttattaaaaagggtcttattcattatggacgagataaccagaatttagacattttacttttccacgaagtcttggagtatatgtctaggatagatagagtgctgagtttccctggaggttcacttctattagcaggacgcagtggtgtaggtcgtcggaccatcacttctttagtcagtcacatgcatggagcggtcctgttttctccaaagatttccagaggatatgaactgaagcagttcaaaaatgatctcaaacatgtgctgcaacttgcaggaattgaagcacaacaggtagttttacttcttgaggattaccagtttgtacatcctacatttttggagatgatcaatagccttttgtcttcaggtgaagttcctggactctatactcttgaagaattagagcccttgctgttaccacttaaggatcaagcttcacaagatggtttttttggaccagtcttcaattacttcacatatagaattcagcaaaacttgcatattgtcttgataatggattctgcaaattcaaacttcatgataaactgtgagagtaatccagctttgcataagaaatgccaggtgttgtggatggagggttggtccaatagcagtatgaagaaaatacctgaaatgttattcagtgaaacaggtggtggagaaaaatacaatgataaaaaacgaaaagaagaaaagaaaaaaaattcagttgatcctgattttctaaaatcatttttattaatccatgaatcttgtaaagcatatggtgctacaccaagccaatacatgacctttttacatgtgtattctgccattagtagtagcaagaaaaaggaattattaaaaagacaaagtcatttgcaggctggtgtatctaaactaaatgaagctaaagctcttgtggatgaactgaacagaaaagctggagaacaaagtgtgttacttaaaacgaagcaagatgaagcagatgctgcccttcaaatgatcacagtgtcaatgcaggatgctagtgagcaaaaaacagaacttgaaagactgaagcacagaatagcagaagaagttgttaaaattgaagaaagaaaaaataaaattgatgatgaattaaaagaagtacaacctttagtcaatgaagctaaactagcagttggaaacattaagcccgaatcactttcagaaattcgctcactacgcatgccacctgatgtaattagagatattcttgaaggagttttaaggttgatgggtatctttgatacatcttgggtgagcatgaaaagtttccttgcaaaaagaggtgtaagagaagacatagcaacctttgatgcccgaaatatttcaaaggaaataagagagagtgttgaagaacttctttttaaaaataaaggctcttttgatccaaagaatgctaagcgtgccagtactgcagctgcacctttggctgcctgggtgaaagtcaatattcagtattcccatgtcttggaacgaattcatcctttggaaactgaacaggcaggattagaatcgaatctgaagaaaactgaagacagaaaaaggaaactagaggagcttcttaattctgttggtcaaaaggtatcagaactcaaagaaaaatttcagagcaggacttcagaagctgccaaacttgaggctgaagtaagcaaggcacaagaaacaatcaaagctgcagaagtcttaattaatcagcttgacagagaacataagagatggaatgcacaggttgtagagataacagaggaattagctactcttcctaaaagagctcaacttgctgctgcatttattacatatctttctgctgctcctgaatctctgagaaaaacctgtttggaagaatggaccaagtcagctggtcttgagaaatttgatctgaggagatttctttgtactgaaagtgagcagttaatttggaaaagtgaaggcctaccatcagatgacctttccatagaaaatgctcttgtaatattacagatcattggtttgaaatcatggagtcgagtgtgcccatttcttatagatccttcttcccaagctacagagtggttaaaaacacatttgaaagactcacgtttagaagttatcaatcagcaggatagtaactttatcacagctcttgaattagcagtacgttttgggaaaacccttattatacaagagatggatggtgtagaacctgttctttatccattattgagacgagatctggttgctcaaggaccacgttatgtggtacaaataggtgacaaaattattgactacaatgaagaattccgcctctttttgtcaacaagaaacccaaatccttttattccaccggatgcagcttccattgttactgaggttaactttactacaacaagaagtggattacgagggcagcttttagctttaaccattcagcatgagaaacctgatttagaagaacagaaaacaaaactattacaacaggaagaagataagaaaatacagctagccaagctcgaagaatctcttctagagacacttgccacatctcaaggcaatattttggaaaataaggatttgattgagtctttgaatcagacaaaagcaagcagtgcacttattcaagagtcacttaaagaatcttacaaactccaaatttcccttgatcaagaacgggatgcctatctccccctggctgagagtgccagcaagatgtacttcattatttctgatttgtccaaaattaataacatgtaccgttttagtttggctgcttttctccgacttttccaacgagctctacaaaacaaacaggattctgaaaatacagaacagagaatccagtcacttatcagctcattacaacatatggtatatgaatatatatgtcgttgtctatttaaggctgatcagttgatgttcgctttgcattttgttcgaggcatgcatcctgaactttttcaagaaaatgaatgggatacgtttacaggtgtggttgttggagacatgttacggaaagctgactctcaacaaaaaatacgtgatcagcttccgtcttggatagatcaggaacgaagctgggccgtggcaacattaaagattgctctccccagtctttatcagaccctctgctttgaagatgcagctctgtggcgtacttattataataattcaatgtgtgagcaagagtttccatctatccctgcaaagaaagtttccttatttcagcagattcttgtagtacaggcgctaagaccggacagattgcaaagtgccatggctctttttgcatgtaaaactctgggactgaaagaggtgtccccactgcctctaaatctcaaacgtttatacaaagagacactggaaattgaacccatcttgataattatttctccgggtgctgatccttctcaggaacttcaagaactagctaatgctgaaagaagcggagagtgttatcaccaggttgccatgggtcaaggtcaagctgatttagcaattcaaatgctaaaagaatgtgcccgcaatggagactggctctgtttgaagaacttacatcttgtggtatcttggctgccagttctggaaaaggaattgaatactcttcaacctaaagatacctttcgtctttggctcactgcagaagttcatcccaactttactcctattttactacagtcaagtctgaagataacatatgagtcacctccaggtttaaagaagaatttaatgcgtacttatgagtcttggactcctgagcaaattagcaaaaaagataatacacatcgagctcatgctctcttcagtcttgcatggtttcatgctgcatgtcaagaaagaagaaactatattcctcagggttggacaaagttttatgaattttctttatcagatcttcgggctgggtacaacattattgacagactttttgatggtgccaaagatgtacaatgggaatttgtacatggtttacttgaaaatgctatttatggaggacgtatagacaactattttgaccttagagttcttcagtcatacctgaagcagttttttaattcttcagttattgatgtattcaaccaaaggaacaagaaaagcatttttccatattccgtatctctaccacaatcctgcagcattttggactatcgtgctgtcattgagaaaattccagaggacgacaaacctagtttctttggtctgcctgccaatatcgctcgctcatctcagcgcatgatcagttctcaggttatttcacagttgaggattttgggcagatccataacagctggttccaaatttgacagagaaatctggtctaatgaactttctcctgtcctcaatctctggaagaaactaaaccagaattcaaacctaatacatcagaaagtgcctcctcctaacgatcgacaaggatctccaatactgtcattcatcattcttgaacaatttaatgctattcgtttagtacaaagtgtccaccagtctcttgctgctctcagcaaagtcatcagaggaactactttactgagttcagaagtacaaaaattggcaagtgctttattaaaccaaaagtgtcctctcgcatggcagagcaagtgggaaggcccagaagatcccttacaatacctgagaggtcttgttgcccgtgcccttgcaatacagaactgggtagataaagctgaaaaacaggctcttctctctgaaacacttgacctatcagaacttttccatccagacacatttcttaatgctcttcgccaggaaactgcaagggcagtgggtcgttctgtggatagccttaaatttgtggcctcatggaaaggtcgactgcaagaagcaaagctacaaattaagatcagtggcttgttactagaaggatgtagttttgatggaaatcaactttctgaaaatcagcttgattctcccagcgtgtcatcagtgctcccttgttttatgggctggattccacaggatgcatgtggtccatattctccggatgagtgcatctctttgcctgtttacacaagtgctgaaagggatcgtgtggttaccaatattgatgttccatgtgggggcaaccaagaccagtggattcagtgtggagcagctctattcctaaaaaatcagtagaatctaatgacaacaaaagccatcttcacaaaagggaacattgattctttaagctttaaatcaaacatgtggtcagtctacatttgaaatgttagttcaaaatattaacatatagttatgttgttgatgtcactgaaattttaatgtgtaaaagcagcactgtgcatcttttaaagtaataaattaatggagttattgttaaaacagagtattcttttgacaacattaaatatttctgtgagaaagttcacttttccagtggctcaaaaatttgttttaggtcagagattttaagtggtatattaaccaataataaatattttggctgtcatttgtgtcataattatttaataaaagagcattcataattttaaaaaaaaaaaaaaaaaaca

SEQ ID NO: 1077 - DNA, 709 bp, Homo sapiens
  modified_base (587)..(587): a, c, t or g
  modified_base (670)..(670): a, c, t or g
  modified_base (683)..(683): a, c, t or g
  modified_base (693)..(693): a, c, t or g
ccgatttaataggaaactgaagcacagtgagctaaagtaactctcgaagtggtggagcagagagatgaacccaggcagtctgactttagaacatctatgcttaccactatgatgttctcaaggaccccattctgaatataggaataaacaaattcagtttctcccactttaatctcacaacacccttctgactccagatgtgtgtggaggggggttccccacgcattaagcaaataagcaattttgcagcagacaccagctgggtgtcctctaattcaattcacttcttacactacctggagatagcatcagataccataggttgaaggctcagtgccacaagatggctcccacttcagatgacaatcagaagccccagatggtgaccaagggtcctaaccaactagctataagttagggttcccataaccccttcttgagctccattagtttgctagagagcctcacagaactcggaaacactatacagtcatgctgtacataatgacatttcaatgtcagcctgcatagacaatggtgatcccataagattataatactgtatttttactgtaccttttctatgnttaggtatgtttagatagacaaatagtcaatccttgaacaacttgggtttgaactgtgtgggtccacttatacatggattttntttcaataaatgnattggaaaantaaaaaaaaaaaaaaa

SEQ ID NO: 1078 - DNA, 2439 bp, Homo sapiens
cattacgcctaagccctatctaaaagttgtatataactcatctgggtttagcaatgctatgaataaggaaaaacaaagaggaccaatctacgccgtggaagggaaatgcacttctctgatagagacagtgatcattacaggtcctcaagggaaaggtggaatatcaagggaaaagactgggaagctgtgaggtctttccacagtgatatttggcatttgcattttctaaaaatagctagcaagtattcttccatctttttctgttgcctaagagggtattataattcagataaaagatggctatggatgtacgaacaagatggataagaaaaatattcaagaattagaactgaccagatttgattgactgtagaagtgctgaaaatttctctttcttctgtttagctcatatatcttctccccagatactaagcacaaagtgatagactaaattcctatctctgcatgtcaatatgttgacttttagtttgaagtagagccacacatatttggtcagaaattgattgtagagaataaaaaccctgtccaaccaggaaatgagcaaaagagggctggggtgaagattgcaagaatatacatctcagactccaggaaaaggaaaatacaggaactgtgaagactgttttcatttggagaccagcagccattccctctgtctctctattgctgctacccaattagcaacttcccctttgtgacttaaatgccaaaaagatgacattaatggctcaattcagtgtatgaaggattcctgagaagaatatatgataaagcatagcttcctaggtcacccttttaacagggaccaggagtttgggttgtggtagggctgtgtcctgaggtcaggccaagaagtgggctgatatgttaaaggacaactgaatacttcttcaactatataaagaccttctatatgtaatgccatgctatgtcattaatggcatttcattttagctttttaaaaaacccaacgaagggaaattcaaggtaatggaaacattttaagttttaaaatctgagtcctggtcatgggtctactacaaatgtgatttcttcccattgcttctgtttctctaggctaaaccaggaagatagttgtcaaaacttcgggtactattttaacatacatcagcacttgttaatttgctgtaattccctcaatagaacaccaagctttagttttcagtatgtttcttgggcaagtgaggtggtaggtggccatgtactagatcaaacttgattttctagggattgttttcccacttttagagaataccattcttaggctaaactcaattacagaatctactgcatgctatacagccctctatagaaatattcaccctgagtagttaattatgtttcttaatgggtaaatgttttatctagtccctctttttttttaatttcataaaatccagatctctcagagcttaaatacacttcctcttattttccctacaacaaatatggaaaagatctataatatatatttgaatatgtattaagttgttcctcacccttttctattttttattagctattgagtgtttattaatgcttcaaacacttccaagtgctttatgtatattaactgatttaattcttaagttactctatgagatggtattattatcccaatttaataggaaactgaagcacagtgagctaaagtaactctcgaagtggtggagcagagagatgaacccaggcagtctgactttagaacatctatgcttaccactatgatgttctcaaggaccccattctgaatataggaataaacaaattcagtttctcccactttaatctcacaacacccttctgactccagatgtgtgtggaggggggttccccacgcattaagcaaataagcaattttgcagcagacaccagctgggtgtcctctaattcaattcacttcttacactacctggagatagcatcagataccataggttgaaggctcagtgccacaagatggctcccacttcagatgacaatcagaagccccagatggtgaccaagggtcctaaccaactagctataagttagggttcccataaccccttcttgagctccattagtttgctagagagcctcacagaactcggaaacactatacagtcatgctgtacataatgacatttcaatgtcagcctgcatagacaatggtgatcccataagattataatactgtatttttactgtaccttttctatgtttaggtatgtttagatagacaaatagtcaatccttgaacaacttgggtttgaactgtgtgggtccacttatacatggattttttttcaataaatgtattggaaaattttttggagatttgcaacaatttgaaaaaccagatgaacctcatagactagaaatatcaaaaaaaataaaggtatgtgaagagtacat

SEQ ID NO: 1079 - DNA, 1998 bp, Homo sapiens
atatagcagcgaaagggccttggagagagtgccaagcatggagctggggcgcttggagatcccggctgagctggccgtcatgctgaagacggcggaaagccatcgggacgccctggctgggagcatcaccgagtgcctgccgcctgaggttcctgcccggcccagcctgactctcccagcagacattgacctgttccctttctccagcttcgtcgccatcggctttcaggaaccgtccctgcccaggccagggcagccactggcgaagcccctaacccagctggatggagacaaccctcagcgtgccctggacatcaacaaagtgatgctgcggctcctgggggacggatccctggagtcctggcagaggcagatcatgggcgcatacctggtgcggcaggggcagtgctggccagggctgcggaatgagctctttagccagctggtggcccagctatggcagaacccagatgaacagcagagccagcgtggctgggccctcatggctgttttgctcagcgcctttcccccactgcctgtcctacagaagccactgctcaagttcgtgtctgaccaggcccccaggggcatggcagcgctgtgccagccaagagctggcccggagcagccaggagcacctccagcgcacagtcaaatatggggggcgccggcggatgcccccaccgggtgaaatgaaggctttcctgaaaggacaagcgattcgcctgcttcttattcacctgccggggggtgtggattataggacgaatatccagactttcacagtagcagcagaagtgcaggaggagctgtgccggcaaatgggtatcacggagcctcaggaagtgcaggaattcgccctcttcctcatcaaagagaagagccagctggtgcggcccctgcagcccgccgaatacctcaacagcgtggtagtggaccaggacgtgagcctgcacagccggcggctccactgggagaccccactgcacttcgataactccacctacatcagcacccactacagccaggtgctgtggggctaccttcaggggaagctgccagtcagcgccaaggcagacgcgcagctcgccaggctggccgccctgcagcacctcagcaaggccaacaggaataccccctcagggcaggacctgctagcttacgtgccaaagcagctgcaacggcaggtgaacacggcctccatcaagaacctgatgggtcaggagctgagacggctggaaggacacagcccccaggaagcacagatcagcttcattgaggccatgagccagctgcccctcttcggctacaccgtctatggggtgctgcgagtgagcatgcaggccctgtccggacccactctcctggggctcaaccgccagcatctcatcctcatggaccccagctcccagagcctgtactgccgcattgccctgaagagcctgcagcggctccacctgctaagccctctggaggagaaggggccccctggcctggaagtcaactatggctcagctgacaacccccagaccatctggtttgagctgccacaggcccaggagctgctatacaccactgtcttcctgatagacagcagtgcctcttgcactgagtggcccagcatcaactgagaggagtgcaggccggggagagaagaggatgaggcctcccccggcccaagtctcacccacatggtctgccttggatgctatcagatcactgttctagaacctgcctcagcacagcccagccggcccacatgcaggccatgaggcaggggctgctatcacgtcaccagcaggcaaagaaaacagccagaccctctccaggacggcctggggccaaagcgggctgcaggaactcggctggggcacctgaggttgcccagtctgagggagatgcccacccgaccccaggctccgcccaggccccacattagcacaagcccaggcatgggagaaacagctgctgaggaaataaaactccctggagaaaagg

SEQ ID NO: 1080 - DNA, 2309 bp, Homo sapiens
tttggccttatagcagttatccatggccgtactgtagtaaagttccttagaactttgccaggagtgaactagaaaaaagtgcttactagggcctaagagttgctttgtgccgtgtagtctggcctttgcactagtagatcattgctgacataggtcagtttagagacctttctgtgttaatgcctcctggtactgtcttaagatacgtacagtgtctgtttttagatctatgcatatgtcatgaagctccttgtgggctctgcatgaagctgctgctttgtttttgggttaacagatgtgcctgtcaactagcatgtgtattgtccaaattccataaacttaaggtttttaagggctgtgtggtttctgagctctatgtgtctttcctatccttgtaccttcaaagggtgagaaatgagatttatacatccaaagttagtctgataaatatggctttttgtttctccatgtaacctagactgtcaaaaataagtgatggtgataagtaggcctggagcctcagcttctgtaaatctcattcctaaaattttgctagactcgtgttggcaaaaacaaatacctgtggattgtccttaaggcttttaatcagatacctgtgttgctgttagctgaactgtagtgaagcatcgatccaaatcggtcttctgaagtatcagttatgcttttgagtttagaaaatacttaggtgttagtctagtcttcccattcatgaatcagtgtatgtccatatcagagagcctcaacttcttttttcttcctttttaaaaatgattttagtgttttgatttagtgtatactacatagttcagtattattggctttaccagtgttgacagaaaaattttaaatctccagttgcaaacagcaatggattaggatatggaaataaaatcatggtgacatcactgctgagttatcttaaacctctgctacttaattctccatattgaaatgcatactcctccacatacatggcttccaagtaaaggcaattgtagaggggccctgtctatcccagtatggttggattttaaacatatctgtgtttccgttattttgggaactgattaatatttacaattttttttgtttatgagttattttgatactaagaaaagagagaatctagaacatcttgaagttgaaatacaaattttattcttttggtcttgggagaatttaagcagtctatgcaactcatcaaatggtgagaaatagccctccgaggttccagtaagctttcagtgactttgatacctccccaagtttcttgagttgctgcttgtcaacacccagcttttaactgagtgtttgctcctgatggtttaggagattttcatgttgtatcacactgtcaagttttattttgtctttttatccctccgtggatgtgagtttgaaacaagcacggtacagtaatcctgcctgatagagtagtctggaatgagaattactttttgggtgagagagttctccattttaatgtttctaaagtttttcatatgaacttggcattggaaaagggaggtaaagaaaaaggacgtttactaaaagcagtgtctactcttcccctttgtgagtgtttattcatggctaatgaaaaaaagagaaggactcttgggttttgtgttgccatgttaagcatggagagggatgcttgacagcatgctaattgaagccagagcaagtatgtccttcatcaggtaatcaggaactcttcagttgaagctgaggaactaactgattagttgttgatcataatataattggttacaaagtggaagtgccagctggcttaagtacccaaagaaaagaatgcagcagcctaacttagtgttaccatatgttactgaatttgaaactgaccttttttcccaccctacttcacacacctaaaactcttttcttgtcagaccaaagagcgaaaagaaaaaaaaaaagtaaaacactttaccaatctgtcactcaggtacaattttgtggtgagatttttgtctgttctctttgtattgctcttaagagtcctttctcagcatattattctgccattgcctctgtcttccttggggcacctcagctctggatgctacccctgggatatctactgctgttatgtgaatgataggaggtaagtgaccattatagtaagggctctttgtaaaaaaattcaaaaaatttaaaaaggatgtatacattttatagtctggctatcagtttgatatcttgctgtcaagtatgtttctcaatctgtatttatccatcccatcaataaatgttaatggtaaaac

SEQ ID NO: 1081 - DNA, 5698 bp, Homo sapiens
aggttcaagtggagctctcctaaccgacgcgcgtctgtggagaagcggcttggtcgggggtggtctcgtggggtcctgcctgtttagtcgctttcagggttcttgagccccttcacgaccgtcaccatggaagtgtcaccattgcagcctgtaaatgaaaatatgcaagtcaacaaaataaagaaaaatgaagatgctaagaaaagactgtctgttgaaagaatctatcaaaagaaaacacaattggaacatattttgctccgcccagacacctacattggttctgtggaattagtgacccagcaaatgtgggtttacgatgaagatgttggcattaactatagggaagtcacttttgttcctggtttgtacaaaatctttgatgagattctagttaatgctgcggacaacaaacaaagggacccaaaaatgtcttgtattagagtcacaattgatccggaaaacaatttaattagtatatggaataatggaaaaggtattcctgttgttgaacacaaagttgaaaagatgtatgtcccagctctcatatttggacagctcctaacttctagtaactatgatgatgatgaaaagaaagtgacaggtggtcgaaatggctatggagccaaattgtgtaacatattcagtaccaaatttactgtggaaacagccagtagagaatacaagaaaatgttcaaacagacatggatggataatatgggaagagctggtgagatggaactcaagcccttcaatggagaagattatacatgtatcacctttcagcctgatttgtctaagtttaaaatgcaaagcctggacaaagatattgttgcactaatggtcagaagagcatatgatattgctggatccaccaaagatgtcaaagtctttcttaatggaaataaactgccagtaaaaggatttcgtagttatgtggacatgtatttgaaggacaagttggatgaaactggtaactccttgaaagtaatacatgaacaagtaaaccacaggtgggaagtgtgtttaactatgagtgaaaaaggctttcagcaaattagctttgtcaacagcattgctacatccaagggtggcagacatgttgattatgtagctgatcagattgtgactaaacttgttgatgttgtgaagaagaagaacaagggtggtgttgcagtaaaagcacatcaggtgaaaaatcacatgtggatttttgtaaatgccttaattgaaaacccaacctttgactctcagacaaaagaaaacatgactttacaacccaagagctttggatcaacatgccaattgagtgaaaaatttatcaaagctgccattggctgtggtattgtagaaagcatactaaactgggtgaagtttaaggcccaagtccagttaaacaagaagtgttcagctgtaaaacataatagaatcaagggaattcccaaactcgatgatgccaatgatgcagggggccgaaactccactgagtgtacgcttatcctgactgagggagattcagccaaaactttggctgtttcaggccttggtgtggttgggagagacaaatatggggttttccctcttagaggaaaaatactcaatgttcgagaagcttctcataagcagatcatggaaaatgctgagattaacaatatcatcaagattgtgggtcttcagtacaagaaaaactatgaagatgaagattcattgaagacgcttcgttatgggaagataatgattatgacagatcaggaccaagatggttcccacatcaaaggcttgctgattaattttatccatcacaactggccctctcttctgcgacatcgttttctggaggaatttatcactcccattgtaaaggtatctaaaaacaagcaagaaatggcattttacagccttcctgaatttgaagagtggaagagttctactccaaatcataaaaaatggaaagtcaaatattacaaaggtttgggcaccagcacatcaaaggaagctaaagaatactttgcagatatgaaaagacatcgtatccagttcaaatattctggtcctgaagatgatgctgctatcagcctggcctttagcaaaaaacagatagatgatcgaaaggaatggttaactaatttcatggaggatagaagacaacgaaagttacttgggcttcctgaggattacttgtatggacaaactaccacatatctgacatataatgacttcatcaacaaggaacttatcttgttctcaaattctgataacgagagatctatcccttctatggtggatggtttgaaaccaggtcagagaaaggttttgtttacttgcttcaaacggaatgacaagcgagaagtaaaggttgcccaattagctggatcagtggctgaaatgtcttcttatcatcatggtgagatgtcactaatgatgaccattatcaatttggctcagaattttgtgggtagcaataatctaaacctcttgcagcccattggtcagtttggtaccaggctacatggtggcaaggattctgctagtccacgatacatctttacaatgctcagctctttggctcgattgttatttccaccaaaagatgatcacacgttgaagtttttatatgatgacaaccagcgtgttgagcctgaatggtacattcctattattcccatggtgctgataaatggtgctgaaggaatcggtactgggtggtcctgcaaaatccccaactttgatgtgcgtgaaattgtaaataacatcaggcgtttgatggatggagaagaacctttgccaatgcttccaagttacaagaacttcaagggtactattgaagaactggctccaaatcaatatgtgattagtggtgaagtagctattcttaattctacaaccattgaaatctcagagcttcccgtcagaacatggacccagacatacaaagaacaagttctagaacccatgttgaatggcaccgagaagacacctcctctcataacagactatagggaataccatacagataccactgtgaaatttgttgtgaagatgactgaagaaaaactggcagaggcagagagagttggactacacaaagtcttcaaactccaaactagtctcacatgcaactctatggtgctttttgaccacgtaggctgtttaaagaaatatgacacggtgttggatattctaagagacttttttgaactcagacttaaatattatggattaagaaaagaatggctcctaggaatgcttggtgctgaatctgctaaactgaataatcaggctcgctttatcttagagaaaatagatggcaaaataatcattgaaaataagcctaagaaagaattaattaaagttctgattcagaggggatatgattcggatcctgtgaaggcctggaaagaagcccagcaaaaggttccagatgaagaagaaaatgaagagagtgacaacgaaaaggaaactgaaaagagtgactccgtaacagattctggaccaaccttcaactatcttcttgatatgcccctttggtatttaaccaaggaaaagaaagatgaactctgcaggctaagaaatgaaaaagaacaagagctggacacattaaaaagaaagagtccatcagatttgtggaaagaagacttggctacatttattgaagaattggaggctgttgaagccaaggaaaaacaagatgaacaagtcggacttcctgggaaaggggggaaggccaaggggaaaaaaacacaaatggctgaagttttgccttctccgcgtggtcaaagagtcattccacgaataaccatagaaatgaaagcagaggcagaaaagaaaaataaaaagaaaattaagaatgaaaatactgaaggaagccctcaagaagatggtgtggaactagaaggcctaaaacaaagattagaaaagaaacagaaaagagaaccaggtacaaagacaaagaaacaaactacattggcatttaagccaatcaaaaaaggaaagaagagaaatccctggtctgattcagaatcagataggagcagtgacgaaagtaattttgatgtccctccacgagaaacagagccacggagagcagcaacaaaaacaaaattcacaatggatttggattcagatgaagatttctcagattttgatgaaaaaactgatgatgaagattttgtcccatcagatgctagtccacctaagaccaaaacttccccaaaacttagtaacaaagaactgaaaccacagaaaagtgtcgtgtcagaccttgaagctgatgatgttaagggcagtgtaccactgtcttcaagccctcctgctacacatttcccagatgaaactgaaattacaaacccagttcctaaaaagaatgtgacagtgaagaagacagcagcaaaaagtcagtcttccacctccactaccggtgccaaaaaaagggctgccccaaaaggaactaaaagggatccagctttgaattctggtgtctctcaaaagcctgatcctgccaaaaccaagaatcgccgcaaaaggaagccatccacttctgatgattctgactctaattttgagaaaattgtttcgaaagcagtcacaagcaagaaatccaagggggagagtgatgacttccatatggactttgactcagctgtggctcctcgggcaaaatctgtacgggcaaagaaacctataaagtacctggaagagtcagatgaagatgatctgttttaaaatgtgaggcgattattttaagtaattatcttaccaagcccaagactggttttaaagttacctgaagctcttaacttcctcccctctgaatttagtttggggaaggtgtttttagtacaagacatcaaagtgaagtaaagcccaagtgttctttagctttttataatactgtctaaatagtgaccatctcatgggcattgttttcttctctgctttgtctgtgttttgagtctgctttcttttgtctttaaaacctgatttttaagttcttctgaactgtagaaatagctatctgatcacttcagcgtaaagcagtgtgtttattaaccatccactaagctaaaactagagcagtttgatttaaaagtgtcactcttcctccttttctactttcagtagatatgagatagagcataattatctgttttatcttagttttatacataatttaccatcagatagaactttatggttctagtacagatactctactacactcagcctcttatgtgccaagtttttctttaagcaatgagaaattgctcatgttcttcatcttctcaaatcatcagaggccaaagaaaaacactttggctgtgtctataacttgacacagtcaatagaatgaagaaaattagagtagttatgtgattatttcagctcttgacctgtcccctctggctgcctctgagtctgaatctcccaaagagagaaaccaatttctaagaggactggattgcagaagactcggggacaacatttgatccaagatcttaaatgttatattgataaccatgctcagcaatgagctattagattcattttgggaaatctccataatttcaatttgtaaactttgttaagacctgtctacattgttatatgtgtgtgacttgagtaatgttatcaacgtttttgtaaatatttactatgtttttctattagctaaattccaacaattttgtactttaataaa

SEQ ID NO: 1082 - DNA, 4104 bp, Homo sapiens
tgcaaaggcagccccaactcttccaccacctcctccatctccggctcctgggcttgggaggccccgcgccactgcttcgactggctggggcgggaaggttgaaatggctttgagactccacttttgagcttactcctcctttgcccgactattttctcatagtccctattccaatcaatttctggtgcagcccagcttgaaatggctcttgagcctccgcttttcagctgactcctcgattgctcaactattttctcatagtccctgttccggtcaatttccggcgcagcccagcccagtccggcgaggtctggaaaggcctgactcgcctcgcagcctgaatgacttgtacccaccgccgatgcggacctcccagtcttcttggcgactgtggggtggggggcatgcggttgaagccgttcacacgggcagtccctgcatgtcccctcacgtgctccccagtgcacgcggcacccccgcctccacgcttccctgagcgtgcagcctttggtgagggcagccccacgcacagccccccacaccctccccagcgcctgcagcccctggtgcacgcagtccccaagcccgcacgtgcagcccccaccttgcgcacagctccatgtacagcccctcatacgttcacagccccagtggcgcagaacccatcactactcgctcttcacgcgcttcactgggcgtgcagcccccacagtgcgcagctcaatgcagcctctccacgtgctccccagggcctgcagcctcgtcttaacttcttttgccaggcccacacatacctgcctgtggcctgagtggattggcaatgacagtggtgacagctgacatttactgagtacatgctatgttccagatgctgcgtttccattctccaatgaagaatcttaagtctcagggcctcatgcaaaactatacagctaataaacagtagagttgggatctaagcccagggaattttactctagaactcgcagtattaaccacagtgctctcttggcttatatttctaaggcacatgctgtaaccacttttttttttttgagatggggtctcactctgacatccaagctggggtgcagtggcgcgatctcggcacactgcaaccttcgcctcccagattcaagggattctcctgcctcaggctcctgagtagctaggattacaggcacatgccaccatgcccgtataattttttgtatttttagtagagacggggtttcgccatgttgcccaggctggtctcaaacacctgacctcaggtgatccgcccatctcggcctcccaaagtgctgggattacaggtgtaagccgccacgccctgcctataaccattctttttttagggaggtgtggtatatggtgctaccctggatctgtagtcaggatttgaagaagggagaaggtatttgcttgtgaagaaggcaccatgcattgtgctctgtagtggtgactggagagagagctgggaggggcacaggcagcaaggtccctgcttaaagacagttatctagtttggagaaacttagctggatagtcagttcttacatgcatttggcaagcacttatcatacactgtaaagaggcaatatgtctagcttgttagagggtgggctctggagtcagacttctggctttgaaccccaacttccctgccattttcaaatgacactggagaagtcgcaaaacctatttctgtctcagattcctccccagtaaaagtgggatattaatagtacctcctttggcttgatatgaaaattcaatgagttgatatatgcagaacatcttagaacagcaactagcttagagtaaatcttcagtaattgtaaactgtgaatatactatgtttttggcactgaagccacgtcgtggtaagacagtgcctgacctcaagaagctcagagtctagtactggagacaggtgaacaaatacttgcaaagtgtgtggtgtgagagaggtgtgacaggtgggcgggagcctgcagcaggcacatctgacccatcctaggtgtgtgttgtgcagaaaagttagcctaggctttctaggggcactgatgtctgggccgagtcttgtagggcagggagttagtcaaggggagctgtagtgatccagctggggctgagcaggagctgaaagtgaacagctcacatctgtagggttgccagatttagcaacggaaagtacaggatgccctattaaatgtgaatttcagataaaataataactttgaagaatatgtgtcatgcaatatttttagtataagtatgtcccaaatattgtataaccacacacattattcgttgtttatctgaaattcaaatttcactgggcatcctatgaaaagtctgtcaattttatctgtccgcatttaggaaggtgcagtatgtttcagagtagctggagtgatgcagggaggaaaggcagagtgggccggatggggctgagaggcacacaggaggcagtttgtaaaaaacctatgctatgttaagggatttagattttatcctgaaattagtgatgagcccttggagagctttaaccacagggatgtgaaaccacagagacagcagtgtcgggcacgaagaaatgagtgtcactttctatggctgaatagcaaattactccaaatttaaagtcttaaacagtaaacattatctcccagtttctgtggctcaggaattcagaggcaacttagctgggtggttctggctgaggtttctcatgaggttgtagataagatagtgaccagagtggcagttatctaaaggatgtactgaagctggagaatttgtttctaaggtgactcactctaatggttgggaaggtactgctggctgtcagcaggagagctcagttccttgctacaggaccccccataggacaacttgagcctcctcacaacatgacagctggcttagtaatccaagacagcaaagtgacattaactttggaagtcacatgccaccttgtcattcccatatatcccagtgctaacacagctcagccctgctcagtgcaggagggtcctacacaaggatgtacatacaagaaggtggggatcatggggttatcttggaggctggttttctgggatgggaggcttacatggtgatgcctgtgactttggaggtggaggagaatgatgggcgtacagaggagtgaagaaaggctgggaggaatagagatgtgggagaggaggtgaggcaaagaaaaaagaaaggaggaaggggtgttggagcagattgtagttgatccacagcaaagagcatcaccaaagccattccaggaggaactagatccaccacttcctctgctgggcatgctccaaaaatggttgtggcctccagagaggactccaaaagaaagcacaaaaactagacagtgggagggcatacccaaaagccctgagtttctgaaaaaatattgaaagtttctatggtgaaataggaagttaatgtgcttaggaagaaaaaagtggtaatgattcaaggaaacataatcacacacggttttagttttaatggacatgggaggagccataaaagtagtctatctatcatcagttacatatctaatgaactgtctatctgggataccctatcctgttttaatctgagtgactctctctcagctgagagagctggacagactccattttagcctcttcacttgcagtccccttatccccctcccttaagggaataactagtgcaagctgactccaagcacatccaggaatgcacttactgataagatattgaggcaagctgtaccagcagctcctggggacgtgctcagtggatggtacccaagcccctgcatttatctctttgtgatagtttaagcccctgcacctggaactgtgtatttttctgtaactatctctgtaaccattaattttttttaactttttgcgtgttctgcttctgtaaaaattgcttcagctaggctccccctgccctatttagaccacggtataaaaagaaatctatccccttcttcggggctgagagaattttgagctctagccatctctcggtcactggcaataaaagaactcctgaattaaaaaaaaaaaaaaaaaaaaa

SEQ ID NO: 1083 - DNA, 496 bp, Homo sapiens
  modified_base (357)..(357): a, c, t or g
  modified_base (455)..(455): a, c, t or g
  modified_base (464)..(464): a, c, t or g
  modified_base (474)..(474): a, c, t or g
tcttaaacagtaaacattatctcccagtttctgtggctcaggaattcagaggcaacttagctgggtggttctggctgaggtttctcatgaggttgtagataagatagtgaccagagtggcagttatctaaaggatgcactggagctggagaatttgcttctagggtgactcactctaatggttgggaaggtactgctggctgtcagcaggagagctcagttccttgctacaggaccccccataggacaacttgagcctcctcacaacatgacagctggcttagtaatccaagacagcaaagtgacattaactttgggaagtcacatgccaccttgttcattcccatatatcccagtngttaacacagctcagccctggttcagttgcagggaggggtcctacacaagggatgttacattacaaggaaggttgggggttcatgggggttttttttnggagggttnggtttttttnggggttggggaggtttaacatg

SEQ ID NO: 1084 - DNA, 4471 bp, Homo sapiens
caattacatatttatttttccatacctgatttttttcaagtctgtaataaaaaaagtataagttgagattaacataggttatttttcatgaagtatagcaaacgatctagaatgtgataggagtgtggtttccatttctttttttttttttttaacagacttttgtgctgtagtaagaatgtcttagaagttgtgtcttcgagttcctcaaacaccggacagggctcccccagagctgcctcagcctttgatttggtccatattcagacacttcctgtcttgcatacactctgaggatgggccgcttctagctgccgcccgtctccctcttgccttcttgtctctaaatcagacactcccaagcactccatctgctatactaggagagtgggagagccaaagcattttggagtccatgtaaagtgcctgggaaaagagatgtaagagcagtgggagtttatataattagcgaattcttttctcagaattcagcggaaatgtatttctgttgttattatttacaaaattgtggcctcagaggagctgtcttttggaaaataagttttcattcatgcagttagttagacatgcacgatgtacttgaatcaataaactgtggaccagaaaagggctgcttaaatgaattcacgtgttctaattctctttcgaggctgttgatgacctcctggattcatacccccatgatctgtcttgctcttgcctctgttctttgataaagcacatcagactatgtgacacccatcttttcaagaacgacctaaaagcaatgacaacaggcaggagagaattaccactggcctgggcacagtgacagcagaaggcccacctgagcttggagagttggcgagataaggcaaaatcaaggtgcaacagtgggccatgttccaagggtgaatggatctgagagtccgctgatgttccttactgatcagaacagggaccttctaacgaaacagccagagttccttgaatcaggcagaagttctttagagacaggaagccagagctattgataatatccgaacgacagaggaaggaatttcttattagaaattctaaaataaaacaagtggggatttggttggatacccttagaagctacatttttctctcatccctaagatagatatctcaagtgtatatctgacacctcttggctttgacacggctctgcttctcaagtgaccatttgttttaagtctgttgtctagaattctttgtgggggctggacctctgaaaaagattctcactgcagaggctttaaatctgtgtttttttccactccctccgtcctgggatgtattcggtaggacatttcatttatatcaggatattggctgattcagctctctttcatcgttattattcaggcctccctccaccaccttgttctttattgcctaagtattgccctccccaattcttcatcgtaatagctctaaatttagtttgacccaaattaatttttgttccaacagatatattttaagacagagaagcctctctcaggagccagatgatctgaagatgatgctaatccccaaatacgaagttcctccagctaactctcctctgagctccctcttcttagctttgggattggggatggtctcatccttgccaggaatccctttgttgctcccagtgtctctgatgagcttctcctccctcccagagacaatgcaggggtggttttcagcagaatgtgccacctgcacttctgattgttctgagacccagcccagaggggtggagaaggcgcacaaaccctattccaataaactgcctgcagagaaccacagcctgctaatagtcgttgaggtctcagccccctaaggtctccaagctcatttgaccagcgcagctgcgacttcggctgtctgcctctggcaggtgccaatatcagcatcttgtcccactgccatggggagttaatttttgctccagggcagctgccaagcccagcaccggcatcaatagaaggttttctctgattttcttctcttcctctcaggctaggctttcttaccaatccccaatttccttctgtagggcgccaggagactggccagagatctttagactcttacttagtttgaacatctcttgctgctcacacccaggcttcttcagcagaaagcatgacccatagtaggtactcagaaactggttgaatgaaaagccttgacatttaagggctttattctgtcatacggtggcaagaactggcctattggcatcgtattcctggcattgagctgtattgaccctgaatgtgtcctcctgaggtttttgagggtgacctaggagaaagggtctgaaaaagcactgggatccaagtgactttaaatctgcccgtggcatttcctgctgagaggcgagaaactagcatctctcccaacaggctcacatccgccaggaaggacagagtccaaaacgggggtagactttgtgggaaattcgccagttagtccgctgagattttaatctgcctcaagcacaggatgctgacaagaaaggtagaccactcccccgatcccagacaaaccccaggggtgacaacttctccatcagtatcctgagaagcaacatcaaatgcttaccaagtcagcacgtttactgagtgagtactctgacggaataaaccagcatttggagctgaacttgagaacacagggccctctgacagcagcttagggaaacacccatcccttccagattggcagaatccttccatttcatgtccttcggagacgctgtattctctttacaaatcattcatgaaactgagactcagtctcccaggggtaagtcctgggccacgtgcaaacaatggcaaatccagctcttccatgatagagaaggcaaacacacccaccttcatcctgagcctaaaaggccacctctgagcacttgggcagccactcctctgggcctcagagggccatgagcttggccaggtaggcacagcggcggggaagtcacagctgtcaggtaccggccatggtgcaggtgggaataggagatgccagagctgctttagctgaggaaagcaaacagtcagcagtgctcaaaggagcaaaacttcgaatgtgcacattgacccctgacacctgcaagcataacacagatcctaagactagagtgaagtaggaagaagaattagaaaatccagtggatgtcctgagtatagggaaccagggccgttgaaaatcagtaaaggttgattacctggggcgagaccgggtgactgtggcagtgcaggtgaaggtaccctggaccttctcagttcgctggcacataaggctccgccaataaagcgtggttctctctgtcacacacacacacacacacacacacacacacacacaatgattggagggctatatgatccagcattagcttcctggtgtgccaagcatgcttgatcgggaatttttttttattattattattttttagctgtagctgaaggcatttctcggatgtggagaggagaatggaaatcgcagaaccaaatcagtttgccctgccatatttggctgtggtctgtcattgggcatttctgatgtgcttttctggattcaggaagagctgattgtcctccgagggttgaaaaaaaaaaaacagtttcagaaacctgaatccagggccttatagttctcctcattatcgatcttcttctcccttccctcgcccaagggagtgggggaaacacttttcactgcagagtttgctttaaagttttcccatcttgcgtgcattatcccttgatattaaaattattttctcagtttaatccaactcctgctgagaagctgtgtgagatttaggctgtggggtttttttcttgtactcttttggatggtgttgcatttttcactcttaacccgagggtgtgtttcagcttatgttcgttctgtttcatgcaggtttatagcacggtagagtagaaggcggcttctgatttttagggtatttttagaattcattcctgagtgtggggttcagacacccagtctcctcggaacaggggtgaggggtcgactgagctttgttgagaagcctccagttaggcttcgggcgggtctccatgttatattgtgtgtttactgagcttcccactggtagaagatgacacatttgtccatcgtcctgtgtatctgctttccagaggacaccggagcattctcctggggtcactcccacatggctgcctcacatagctgttttgcaacagcctttattgccaacacccttggaagaacatctcctgtagaagtacaagttttgcaatatggactttggaagtggttttgtgatgttcgaattttctgttagcctattgctcaagcactacagaatgtacatagtccctttggccatcctctcaccccagaatatcctaataaacattgttttcttttttaaaaaaaaaaaaaaaaaaaa

SEQ ID NO: 1085 - DNA, 7193 bp, Homo sapiens; identical to SEQ ID NO: 815

SEQ ID NO: 1086 - DNA, 331 bp, Homo sapiens
  modified_base (61)..(61): a, c, t or g
gcctgactgtccccagcagcttccggaacaaaaacagcgacaagcagaggagtgcggacantttggtggaggcagtcctgatatccgaagcttgggacgctatgcaagggacccaaaatttgtgtcagcaacaaaacacgaaatcgctgatgcctgtgacctcaccatcgacgagatggagagtgcagccagcaccctgcttaatgggaacgtgcgtccccgagccaacggggatgtgggccccctctcacaccggcagactatgagctacaggactttggtcctgggctacagcgacgaagagccagaccctgggagggatgaggaggac

SEQ ID NO: 1087 - DNA, 4683 bp, Homo sapiens
tcccgctcctgtacgtggagctcaatgactccgccaagcagctcattgagatggacaagccatgcccagccgctgcatccagctgcaatgcctccctgccctctgactccggcgctgtggccagcgtggccccaagtcccactttaagcagctcaggggcggtcagtgcctttcagcggcgtgtggatggcaagaagaacaccaagaaacgccactccttcaccgcgctcagtgtgacgcacagatcctcccaggctgccagccacaggcattccatggaaattagtgctccagtgttgatcagctccagcgatccccgagccgcggccaggattggagaccttgctcatctgtcgtgcgctgctcccacccaggatgtctcctcctcggcgggatctacccccacggctgtcccacgggctgcctcggtgtctggagagcagggcacgcctcccaaggtccagctgcccctcaacgtgtacctggcgctctacgcctacaagccccagaagagtgacgagctggagctgcacaagggagagatgtaccgggtcctcgagaagtgtcaggatggctggttcaagggggcgtctctgaggaccggggtctctggggtgttccccggaaactacgtgacacccgtttccagggtgcctgcaggaggggcagggccgccccggaataatgtagtcggagggtctccactggccaaagggataaccacaaccatgcacccaggcagtgggagtctgagcagcctggccactgccaccaggcccgccctgcccatcaccactccccaggcccacgcccagcaccccacagcctcgcccccaacaggcagctgtctacggcactcagcccagccaacggccagccaagcccggagcaccatttcaacagctgcccactctgcagcccaggctcaggaccggccaactgccaccgtgtcacccctgcgcacccagaactctccatcccgcctgcctgccaccagcctcaggccccactcggtggtgtccccgcagcacagccaccagcccccggtgcagatgtgcccacggccggccatccccctcacatcagcagcatcagccatcacacctcccaacgtcagtgccgcaaacctcaacggggaggctggaggggggcccatcggtgttctgtccacatccagccccaccaacacgggatgcaaactagacgagaagaaaagtgaaaagaaagagaagaagagtgggctcctgaagcttctagccggagcatccaccaagaagaagtcacgctccccgccatctgtgtctccaacccacgacccccaggtggccgtggacgccctgctccaaggtgcagtgggccccgaagtgtcctcactgtccatccacggcagggcagggtcctgccccatagagagcgagatgcagggtgccatggggatggagcctctgcacaggaaggcaggctccttggatctaaacttcacatctccttcccggcaagctccgctgtccatggctgccatccgccccgagcccaagctgttgcccagagagaggtaccgcgtggtggtctcgtacccaccccagagtgaggcggagatcgagctgaaggaaggcgacatcgtctttgtgcacaagaagcgtgaggacggctggtacaaggggaccctgcagcggaacggccgcacaggcctcttcccgggcagcttcgtcgagagcttctgagaactggtgctccctgcacccagctcacagagggggaggccgcctgggaagctccacggcacacagagagggagccatggcgccccaagggttccaggtcatctccaaggcacctggcgggggataccctggcccagggtgggggccagggactgtggaggtcgtgccttctcccaaaacccccaaacggagagcacacctgggatgttcttcaaggaaatgcccaccccctctgtggaaactgcaaagaaagcaccttgaggaagagaggcaggtgccggcgcaggcaggcctgtggctgtggtttgcagccatggcagcgttctcatttaccacctaagcagggttggaggttgcaggaggtctgcaggcgaggtgggtggcatgggggccaggagcgctggagatcatctttctgggctgccctgggcttcccgcggggcccaggttgctctgtcaccattctatatacctcagtcacctgccgcccggctgctcagcaggggtgtttgtgaggccctgggggtgccccggaaggggcaccccaccgcccctgttgggaaccagagcagaatctgtgggcttgtcgcctgccagtagtataagcaacactttctgttcaccaccattgtcccttgcattacttctttcttacagcatatttttaacataaagctgttagactttatatatttctaataggtcagacattgcctatttttcatacatctggtgctgcctttttgtaaaactaataatgacttggttgagcttgaaagaaaagatgtctgaggcgacatcaaaggggcagaatttttatatttcccatatggctttgggagagcgccgagaagccgccatcccgcacctcagcgctggccagtactctgggggctggcggggtggatccattgagggggtcggagggagcttggaagcagccggtttctttaaactcttaccaaaaccccgcgctctgtctagacggtgatgattattattcaagacctggaaacatttcgaggaagggccactataattgtccttttgtgtggcggtagaaggagcacgcaggtcaaccccagccgggaaggcaaaatcttccctttattgcctcagagagaactgcaattagcattctcagaagatgatttcttggtatcaaaatgtgcagtttctacaacagtttagatcaccaccaccatttttcttcttttttaaaaataaataactgctcccatttcaggcagtgcaaaccttcatctgctggagaccagaggtacaaggagatcagggggttgcagcaccgctgcaggcttgcaagatcggggagttgggagggcgagagaggaggaggtgcagctttgatgctgggacctccctgagtggggctgatgaatgtatattcattagcaccatggctcacttcccaggaagactgatcaggagcccttcagggacaattttgttctcaagattcacaccttaggaacacatttttatcacctcaaaattttgatccatcacccctctctccacctatatttttacaaataccattcagacttaaattaagctgaagaaactagcctttggtaacatagggtgtcattggttttcagggatgtaaccaattccagaaatacattcttttgcctggcatgaagactttgaaacacgggccgcttattttcagagttcctgttttgggacgtgacttggctacttgttacttccaggtggttaccacacggcgggggtcatgcctttccctcccccaagatgataatagatttaatagactcaaagaagttgttcagaatcaaagaagaaaaagtctggcttaaacatagtaacttctgtgtgccaggttaatgacaaccaaaagctctctatttaccattattgccaaacttcatcagttgcccatcctgcaccaaaatcctgtgcgtgtttaaattcacgttgtcaccaaagaggtgcacagatcaacaacctggatgacgcaggtgttctccagggaaaccagaccaagtcaagtctccaggtaacttttttgaagtcttttttttaaggcgcgcaggtaccaagcaacagaatagagtaacctgaacgttcttactctcccaggcatggcccacgtggtgcttcaggtagaaatgtgcttcaccctcctggtggggggcgaggacacagcccactgcatgcagcatggtagagagctggggcgaatatctccatgtctttggaggatgtcagctggccgctttcagggcagagtcgggtgggcgttggtgccaccttaggaaggagagcgatgcgtgggtctggccagagctctggagccaatgccgggctgcctgagagcagaggaaatgcatggcccatgtgcatttctgagtattttaaactcgttcaggccctgcagccttcatgatgatgtagctcgcagagaagagcaggagcagaattagccctttcttcaggccatcttgcctcaaagggtacacatgtttggcggttaagatgaaactaacccttatgtttcatcctggccccatgatgtacacatcttagccatgtagtggccttggggggccacagagatttcctttgaggagcatggtagagtccacagccatggctgaagtcagtggacaccgaggggacaggactgcaggccaccaggggcctctgcccagagggaggcagagaggatggcggccacgggtgctctcctggcatcctcatggggtgatgccaggccgggcacttcaaaacaggctcagccgactgggagatcctttgtactttgcacagttcacacacacaaacacacacaccctatcccaagtgtttttgttagacacaaatgtcagcgtgtgattttggaagacttgtcagtgatgacaaaccatgatgcctgtgtttctgagtctttaaataaaaatgaacatgg

SEQ ID NO: 1088 - DNA, 850 bp, Homo sapiens
  modified_base (6)..(6): a, c, t or g
  modified_base (834)..(834): a, c, t or g
cagatngccagctggccgaggctcatcccctcctcatttcagcaacagcacacaggacaatacgctctagaagaactctttgacttaaaggtatatgattgtttttgttcctttaacatgaacgtgagtctggagaaacagctacggccatcccagccctggccaaggggaaaatgccggaagactccagggtgggaggaagcgcgtcccaaggcccaggatctgcgaggcgacttggggaaaacgcaggcagaaaataaagcatgcgaagaagttaacttggtgccattgggcagagggtgagagcccagcaaaccggagagatcagctgcccacatcagtggcgaggagtgcggagagtgggtgaggctggggcaggaagcaggccagcctgccagagcccaggaacaggtgaaaggcaagagacctgctgaagctcacacccgtggaccacccagactgcctgccgctacaggatgccctccgcatctcccaggacttctttccggcatcagtgtggacattgaccccactggactgcagtcacagtggactcccaaggggcaggatccacctctgatgttcagtgaagactaccagaaaagtctgctagagcagtaccatctgggtctggatcaaaaactcagaaaatacgtggttggagagctcatctggaattttgccgatttcatgactaaccagtgtcagcccaagactaccccgtcggtcattctgttcctgccgtcctgtgaggagccccaagccaacaaggccacactggtgtgtctcatgaataactttatccgggaatcttgatggtgacctggaaggcanatggtacctcatcacc

SEQ ID NO: 1089 - DNA, 468 bp, Homo sapiens
  modified_base (278)..(278): a, c, t or g
  modified_base (298)..(298): a, c, t or g
  modified_base (331)..(331): a, c, t or g
  modified_base (346)..(346): a, c, t or g
  modified_base (382)..(382): a, c, t or g
  modified_base (405)..(405): a, c, t or g
  modified_base (411)..(411): a, c, t or g
  modified_base (419)..(419): a, c, t or g
  modified_base (427)..(427): a, c, t or g
  modified_base (447)..(447): a, c, t or g
  modified_base (459)..(459): a, c, t or g
tcatcccctcctcatttcagcaacagcacacaggacaatacggtctagaagaactctttgacttaaaggtatatgattgtttttgttcctttaacatgaacgtgagtctggagaaacagctacggccatcccagccctgggcaaggggaaaatgccggaagactccagggtgggaggaagcgcgtcccaaggcccaggatctgcgaggcgacttaagggaaaacgcaggcagaaaataaagcatgcgaagaagttaacttggtgccattgggcagaanggtgagagcccagcaaaccngagagatcagctgcccacatcagtggcgaggantgcggagagtgggtnaggctttgggcaggaagcaggccagccttccagtgnccaggaacaggtgaaaggcaagngacctnctgaaagntcacaccngtggaaccacccagattgcntgccgttacagnatgtcctat

SEQ ID NO: 1090 - DNA, 3814 bp, Homo sapiens
ggcagacagggaaggcttgtgggtgaggaaactcatccagatcccacggttggtaagaagtggggctgaaattggaccgagggcattggctgctcctcagggagaggctggtctgagacagctggtgccagagacacagcctgcaaagctcagctgctcaccgcatccatgagggtcagctgctctgccagcagcctgggagggaaggtcgtcatgtcaggcagctcctcactgggttggttctttacagacccacgacagggacaggaggactctggggctgactgtggctccagcactgtccctggagggggcccctcccctggtgctggtgctggccctggtgctgaatgtagatatcctggtggacccagggctgcaggtgactctggctccagagcaggccccaggtccgccagcagtggtggtgctggctccagggccggcattgttaatgcgtgttgcccaggacgtggagcaggatctggaaaaggaggaaaggtcaccacaccagtcatttttcactgggttttccaagcacagaaatgaccgggtggaatttaagggaattgtagccccaaaacaccacccccggaaagtcttgcagactgcaagccccctcaccatctggcttggcctcgttgggctccggaagcaccaactggcctaggacaatttcctgatggtcctccaagcccagtccaggccaggagaggttcctgaaggccagctttatccggaaagatgaccgttgcgggggctgatagtaaactgaagtgttttcggggggccagttgaacaaaatggaggtgatggtgctggtgatggagtagacagctgagtcagaggcctggccttctcccacacaaccctccagggcacccctgcgtggttctgggtccctggcctgttgctgccagtgtggaggacagccccaccctaccgtaagccatcagtgctgtcctggaaggggcagacctggccatacagcagggctgtacagaccctcgtgcgccctggcgtcccacagacattctcttcccaaaggccctggagcacagcactgtacacctgggcactcaagactgcagctgcaggcagacttgtgagcagcttcctcatcaaagctccagatctgggtcccctggtcctggggttaggagggaaggggcagatgtcggggggaggaggacagggagagctgggaagccacggtgctgagggggatgggtctctcagtggccagctgtgaccccagcctcccctctgctttgcaggggacctaagtctccatttacagaactcactatttgcctcttgtgggggaagtccccagatgtcagccttctcgtgggaattataagaagtatgagccccagagctcctttagtctctccccagccagagtccacatattttcccccatgttttgtgggtgaaaaggcccttcagaaccctaaatccacccagtttatatttgttgctgggctgcgtcattctagtcagaatctgggaggatgccaccatacgtagaggaggccatgagggtctcacctgtaacattctgtagatatgacttgtttattctgtctactgtgagtgcctgactctgagtagaatcaaggccgggggattgtcatctgctttgtttatgaaattatgccaagccccaagaagagcgatgcacaaatgaggtgttttgaatgtatgtgttgaatgagtgaaccccaacctttggagaaccccagtgagcctctccagatgtctgagtgggcctgtggctcctttttcagcaccaagggacccctcttctgtctgtgtcaaggagaaagaccagccagaaggaatctcagacatcctttaccagtgccatcgcagacttggtttctatgtgtttttccaagcagtgagtgatacaggccattgaggcagaatgctgagagctgcttcaagtgagggggaagagaaaagtaacaaacatgaatcacagcacccccagcagattttccagagttttaggctctagggacccctttgtttgctgtgtcttagatcattgagtccctacaagaaccctgtgaggttcgtcttctcactactccctgttccagaggagccaaccgaggctccgagaggtgcatcttcaagacagagccagtaggggacagaggcacctctgtgtcttggagggggatggacactcaccttctaaccagtagttccaaaaagtgtggcacagtgataaagtcccaggaggggcccaggcaggtggcataggaggagatgggtttagttagaaaggctggaaccagggactcccaacagcttctccccagtgccgggctggaaagttagcatcctgcagatctcattttcatactagggggacaaggagggacatgggagtcagtggtaacaccatggaccaccagaggatcgggatctggaactcacaccaagaagcaccaacccttcagggacttgtgcatatggagaacctgggtgcccatggtgaaaagcgttctaggctttcaaagtaacattgcatgtgaggatggagaatgataaaacgattcctgccttcaaggcatcgtcccggtgtttgtcagctgtggggcaacagcaccctctgtgtcagcaacctgcatgaagagcatcatccctgcaagtcctcaaggcctggggaggcctcatcccctcctcatttcagcaacagcacacaggacaatacgctctagaagaactctttgacttaaaggtatatgattgtttttgttcctttaacatgaacgtgagtctggagaaacagctacggccatcccagccctggccaaggggaaaatgccggaagactccagggtgggaggaagcgcgtcccaaggcccaggatctgcgaggcgacttggggaaaacgcagaaaataaagcatgcgaagaagttaacttggtgccattgggcagagggtgagagcccagcaaaccggagagatcagctgcccacatcagtggcgaggagtgcggagagtgggtgaggctggggcaggaagcaggccagcctgccagagcccaggaacaggtgaaaggacctgctgaagctcacacccgtggaccacccagactgcctgccgctacaggatgccctccgcatctcccaggacttctttccggcatcagtgtggacattgaccccactggactgcagtcacagtggactcccaaggggcaggatccacctctgatgttcagtgaagactaccagaaaagtctgctagagcagtaccatctgggtctggatcaaaaactcagaaaatacgtggttggagagctcatctggaattttgccgatttcatgactaaccagtgtcagcccaagactaccccgtcggtcattctgttcctgccgtcctgtgaggagccccaagccaacaaggccacactggtgtgtctcatgaataactttatccgggaatcttgatggtgacctggaaggcagatggtaccctcatcacccagagcgtggagaagaccacgccctccaaacagagcaacaacaagtacgtggccagcagctacctgagcctgacgcccgagcagtggaggtcccgcagaagctacagctgccaggttatgcaagaagggagcaccgtggagaagtcagtggcccctgcagaatgttcataggttccagcccccaccccacccacaggggcctggagctgcaggatcccaggggaggggtctctctctgcatcccaagccattcagcccttctcgctgtacccagtaaaccctcaataaatatctttgtcagccag

SEQ ID NO: 1091 - DNA, 2243 bp, Homo sapiens
atgcgggcgcgtggccccgcccccaaacaaggccacgcggcgtgcgctcacccgcctctcggggacagtaccaccagccccggcctgaggccccgacccctcagcgccacacgcacaagcgcgttcgcacgattggtgcaggcggacgcgcgaggtcccgcgcctgcgcacacccccgaggctggcacgcacaccggtctcctaggggactggcgcctggccctgcttttcatcctctcaggagatcacgtgtggacactgaggcccttcctcgagctctttaaccaaacccaacctccccaattcgccgccttccccgctcccacaaccacacgttcccgtgtgagggcttattgcctccagccagccagcgtccttcgcccccacattcacgaggtttggagccggcctcacccgcggaggcggacaccgcccacccgcgcgtgcgcactacgcagtcatcctgcgacctccagaatccaccggggtgcagcgaggctgtggaaagtcccacccagaacgtgaggtgaagaaggcttgggctgcgctggttctgctctgtccgggtcggagatgaactgacccgggagagcagcggagggatgtttcttttggccaacagtggggactcacctgcacgttttgcgaagaggcccacagtcctttgcgtggcgctcggactacatttcccaacggcccctgcacgccctgggggctgttccatgcggtgttgcgcctgcgtagccggcgggctggcagtgagactgactgcgtcggggttgagactgggtggatgaggctcaccccggcggggagaagggacgaggaggggcggacagcggaaggtccgggagtgtccgccataaagtcgtttgaggtgaccgttgcgtaattgtgagtctgtgagagaagatgtgaagtatggcctcgtcccggtcatctgggcgtgcgggtcccgggttttgatcgcgcgtttgtgtagttttaacttctagtcatggcgaatgatcgcaggagagcacagactggaccctgctacgatctctcttggagtggatcagactgatgatcaccaacaaccaactcattcccggataaggaagaagagagtgtcacctacttcagtgtggtttcaaccctacttctgcatcttaaagacactgtatggtttcagcagtagtgcccctgttcattagtccccctgatgttttcattcctcatctcatctttttcttagcagcattcaatgaatccttcattctagaaacactctatatctttggttttcatgagaccattctcaccttgttttgtcctgtgacttttttgaaaaaaacaaaaacaaaaaaccctttttttctttttaaattctggtaaaaaacacaatgaaaatttgctatcttaaccatgttgaaatgtgcagttagtaaagtacattcacattgtggtgcaagccatcactaccatccatcactagaacccttttcatcttgcagatctgaaactctacccattaaacgacttcccatcttcccatccccacagctcctagcaaccaacattctactttctctatcagtttgactactctaggtacctcatatgagtagaatcatacagcatttatccttctctgcctggcttatttcacttgtataatgtcctcaaggttcattcatgttgtagcatgcatcagaacttcctccccttttaaaggctggataatatttcatggtatgtttagatcacattctgtttatccattcatccatcagtgaacacttgtgctccttccaactttgggctgttgggtgtcctgccactgttgctcctagtgctcaatctcgtttattccctcctaatcaagtgtacaacgttggacactgtgcaggatgatgccacttcatcttggatgctaatctgccatgttgacttctgattaaccccaggcccaggaatgcctcaagatttctactttacttactgttgcttgtgtaagccaagacaaccttgatgttatcataaacatgtacttacctaagtcctgtcctttggcaaattatgggctatgagacacagcattcttgcctttccctgaggggtcaatttcagcgatcctacacattccttctgaagcacttatgctctttctatatggtatgtaagctctcggtctggggagtaacagtgcagagatctacctgtcttgttgccacatgtttctaaactttccaataaatcac

SEQ ID NO: 1092 - DNA, 440 bp, Homo sapiens
  modified_base (126)..(126): a, c, t or g
  modified_base (249)..(249): a, c, t or g
  modified_base (298)..(298): a, c, t or g
  modified_base (355)..(355): a, c, t or g
  modified_base (364)..(364): a, c, t or g
  modified_base (370)..(370): a, c, t or g
  modified_base (398)..(398): a, c, t or g
  modified_base (434)..(434): a, c, t or g
atttttacatcagcttgtcagaaattatattaaaaacactttggggaaagctaagagcagtgcactgtttagcacagattttgtgagattctatactcttttaatgagcatttcatagggtttttntttttttgctgtttttttttctttttttgctttgctttactttgccaatcagttacttttataccaaattaacgaagtttctttaaaaacttcctggttaaattgtctgttatcatatagaanagaatcaaactgaatcactttacatttctctaaagatagttcagttttnaatccatccagagtttgtgaatcagcctgatagatcataagccatttataattgtgnaacgttccnttggantgagtatatcataccaaatgtttaattncctctcggcttcattcaggtttttacattacttttnatggac

SEQ ID NO: 1093 - DNA, 445 bp, Homo sapiens
  modified_base (427)..(427): a, c, t or g
tttttttttattttcatatttttcatttattttccagaaaaagaaatcacatttcagtaacaacttacatatagaattaaactttgttctggaatgggagccctagttgcagtaacgtgtcataataaataattgcatattcaggattttgtgaaataggtgattgggaaaattatgaacaaaaaacatttacaaaaattattatttacaaagagtgatatccatactatttctaacttataaggcaagtaatgttaagatggtctcatgattatcttcaacaagtcaattacacactttcctgtcaccattgcccagcagagagctttgctgccaattctgtgaaggagccaagtaagtcttcgcttccgttgttgggtttctcttgaggcacagcataggaggcggtaaagctttcctttacagncttaaggcggtaatgggc

SEQ ID NO: 1094 - DNA, 850 bp, Homo sapiens
  modified_base (1)..(1): a, c, t or g
  modified_base (5)..(5): a, c, t or g
  modified_base (13)..(13): a, c, t or g
  modified_base (42)..(42): a, c, t or g
  modified_base (51)..(51): a, c, t or g
ncctnccagctgnccgaggatttcattcacccttgtgagcanctctagganggaggtgttatcctctaattgcagatgaggttgatgaagcttaaagagtaatgatgccttgagtccatcctctggctccaaagcccttgtatttaactgttctcccttttgcatccctgtgctaaagtgactttgctataatatccacaaggaagaatttctgtgtaaaaattagacttccttgcaggcagtctatcagtgatatccaataaagactcaataatggctaacaatacaaaccacacacacaagaaaaacttctccttttgtgccaggtacttagattaggtgtagtggttttcttaaactgattatcaaggtaaacaccacctcatacatttcagcagagagcagtggtttctctctccagcagtgggagccattgaatcaggacaatgccacacagttgggctttcatgttagatagatcactcttgtggttttgggggatggcattataagagaggagactggagacaggggggctattgtcatgcagatttgttggatgtccacccagcattcactttttccatcttttgccaggggtacactacacaacatcaccagtcatttcatagaatggcaattagattaggcttaggtctgcactgccttccttcactccgctctgtcacttgccatcattgtaaatgctgacaacttagtgcctttcatgcttcaagtatcaataagataggaatagtaatagtatcacattgaattattgtggagttttgaacagatgatacttgtgttatcagtgctcaataaatattagctgtcctcttcaaaaaaa

SEQ ID NO: 1095 - DNA, 563 bp, Homo sapiens
  modified_base (107)..(107): a, c, t or g
  modified_base (410)..(410): a, c, t or g
  modified_base (423)..(423): a, c, t or g
  modified_base (466)..(466): a, c, t or g
  modified_base (475)..(475): a, c, t or g
  modified_base (495)..(495): a, c, t or g
  modified_base (529)..(529): a, c, t or g
  modified_base (544)..(544): a, c, t or g
  modified_base (562)..(562): a, c, t or g
aatccttggagcaactctaggagggaggtgttatcctctaattgcagatgaggttgatgaagcttaaagagtaatgatgccttgagtccatcctctggctccaaagnccttgtatttaactgttctcccttttgcatccctgtgctaaagtgactttgctataatatccacaaggaagaatttctgtgtaaaaattagacttccttgcaggcagtctatcagtgatatccaataaagactcaataatggctaacaatacaaaccacacacacaagataaacttctccttttgtgccaggtacttagattaggtgtagtggttttcttaaactgattatcaaggtaaacaccacctcatacatttcagcagagagcagtggtttctctctccagcagttgggagccattgngtcaggacaatgncacacagttgggctttcatgttaggtcggtcactcttgtgggntttgggggntgggctttttaaggagaggngtcttggagacaggggggctattatcctgccagnttttttggatgtccnccccggcattcacttttng

SEQ ID NO: 1096 - DNA, 3833 bp, Homo sapiens
acaatataataataatgtaacataaaattaccatgtcattggtgggacacacaatttactaaagtgtaaaaaccataacataactcttggaatctctatagaactacaaaatatagttgatgcttgaacaatgcaggcattaggagtggcaactccacaaagttgaaaatctgcatataactttagactctccaaaaacttaacttctaatagcctaccattgaccagaaactttactgataatgcagtagattatcacatattttgtatctgcattatatactgtatttttaaaataaaataatctagagaaaagtgagtattgacggggcgtggtggctcatgcctgtgatcctagcattttggagggctgaggtgggtggaacacctaaggtcgggaattcgagatcagcctggccaacatggcgaaatcccgtctctactaaaaatataaaagttagctgggtgtggtgtcaggcacctgtgatctcagctacttgtgaggctgaggcgggagagtcgcttgggcccagggaggtggaggtttcagtgggccgagatcacaccacttcactccagcctgagcaaaagagcgagactccgtctcaaaaaaaaaaaaaaaaaaaaaaaaaagtgaatgttaagagaatcataaggaaaagaaaatatatttactactcattaagtgaaagtggagcatcctaaagatcttcatcctcatcatttccagattgagtaggctaaggagggggaagaagaagagggcttggtcttgctgtctcagtggaggcagaggcataagaaaaacgtggataaatggatccatgcagttcaaacccctgttgttcaagggccagctgtatgcttaaacacatccctgggggttgtaaaactaatgttactgttgttttcattttgcaatttttccatcttgatataaaagcaaaagtaaagctaatctatgtacaatttattataggtcaactgagaatggcagaggactcatcccacctttgccacatggtgacttgccccactcccccaggtgaccttgctcgtgcatgtggatatttgctcagattaagaatgtttcccacaaaattgcttactctctttcattctgtccgtggttgcttgtggtttatttgttgataactgagactatttaaagattgccaaaacaaaagccatttcttttctccccgaatagcctcattttttctattccctttttcccctcctattaacatttctggggactctaaagcagagctcaagatggttcaggaccacggagagcgcaaggaaggggaactaccaaagcactttagtcatgcaggtggggaaagagatgatcctaaaattgtttttgtttttctgtttttttgagagggagtctcgctctgtcacccaggctggagtgcagtggcacgatcttggctcgcttcaacctccgcgtcccgggtccaggcgattctagcgcctcggcctcctgagtagctgggattgcaggtgtgcaccaccatgcccagctaattttttgtatttttggtagagactgggttttgccatgttggccaggctggtctccaattcctgacctccggtggtccacccccctcagtctcccaaagtgctgggattgcaggcgtgagccaccacgcccagccaatagtggaattgttgccggacaatatttatttaaaagacattattgtaaagagtaacagtgtaattctggctccttgaaatttgaggggaatgatttttctggacattcgaccagtgctttctaaatttctccactgaattctatctaatgacagatgagaggacactgaaagtaggagtagccataagtcaccagtgcaaaatgtcttttgaagtttgcatttattgattgctaccatttatgtaaagttttacagttttgacagtcatagggttcaccaatccaccatagaagagaattaagtcatgcggacacagcagggtttagaatggatgagtagaggagtgtgtgcaggctccagtccccaaagtctctaggactgtcctagaacctgcagctcatctgtcaattctgtcaactactcaggatcctctcaagaattatccccccatacccaccttttaaatttcctcaagctagtttcatttgagttttgtcacttgcaactgaatgagccctgctaatgcagatagattcaattgagaaggggaattctaggctaggagtacaaggttacaggcaaggagacaggaacatagcttgggatttcctggggcagtgagaaaactgactttaaaaaaatggaatggtttctaaaatgtttgtacaacttctctgtatggcaatggggtaggagtataaattctttcagcttcttctgagggcagctgaacaagaagtataaaaattttgaatgctgataacatttgacctagcaattccatctctagaaataaattctacagtagtaatcttaaaaacgtattcactgaaatgttattttctcatagaaaatgtcgaaacaacatatgtgtccatcaatagagaacttgctaaatgatttatactacctttacatattgaaatacgcatagccgtggaagataatttagtagatctatatgtcccattatggaacaatccccatggtggggggaaaagtaaggtgcagaactgtatcatagatgttctctctctctctcttttttttggaaagcacatgtatgcttttatatacacagaaaaattctagaatggcaaacaagatatctttgcaatagtttttttctgggaggggactcatttaaaaaaattctcccatattgcttgttttgttttgttaaagacatccatgtattcctacttgggttaagccatgataactaaatatgattaaagttcagaacaataaaaaccttagagatgtatacataaatatcacttgcttaggaatttctaggtaggtactattttaagccctctacatatattatttcattcaatccttggagcaactctaggagggaggtgttatcctctaattgcagatgaggttgatgaagcttaaagagtaatgatgccttgagtccatcctctggctccaaagcccttgtatttaactgttctcccttttgcatccctgtgctaaagtgactttgctataatatccacaaggaagaatttctgtgtaaaaattagacttccttgcaggcagtctatcagtgatatccaataaagactcaataatggctaacaatacaaaccacacacacaagaaaaacttctccttttgtgccaggtacttagattaggtgtagtggttttcttaaactgattatcaaggtaaacaccacctcatacatttcagcagagagcagtggtttctctctccagcagtgggagccattgaatcaggacaatgccacacagttgggctttcatgttagatagatcactcttgtggttttgggggatggcattataagagaggagactggagacaggggggctattgtcatgcagatttgttggatgtccacccagcattcactttttccatcttttgccaggggtacactacacaacatcaccagtcatttcatagaatggcaattagattaggcttaggtctgcactgccttccttcactccgctctgtcacttgccatcattgtaaatgctgacaacttagtgcctttcatgcttcaagtatcaataagataggaatagtaatagtatcacattgaattattgtggagttttgaacagatgatacttgtgttatcagtgctcaataaatattagctgtcctcttccttat

SEQ ID NO: 1097 - DNA, 697 bp, Homo sapiens
cacaggaaacagctatgacatgattacgaatttaatacgactcactatagggaatttggccctcgaggccaagaattcggcacgaggcagagggaaccatggaagccccagctcagcttctcttcctcctgctactctggctcccagataccaccggagaaattgtgttgacacagtctccagccaccctgtctttgtctccaggggaaagagccaccctctcctgcagggccagtcagagtgttagcagctacttagcctggtaccaacagaaacctggccaggctcccaggctcctcatctatgatgcatccaacagggccactggcatcccagccaggttcagtggcagtgggtctgggacagacttcactctcaccatcagcagcctagagcctgaagattttgcagtttattactgtcagcagcgtagcaactggccctggacgttcggccaagggaccaaggtggaaatcaaacgaactgtggctgcaccatctgtcttcatcttcccgccatctgatgagcagttgaaatctggaactgcctctgttgtgtgcctgctgaataacttctatcccagagaggccaaagtacagtggaaggtggataacgccctccaatcgggtaactcccaggagagtgtcacagagcaggacagcaaggacagcacctacagcctcagcagcaccctgac

SEQ ID NO: 1098 - DNA, 243 bp, Homo sapiens
cagagggaaccatggaagccccagctcagcttctcttcctcctgctactctggctcccagataccaccggagaaattgtgttgacacagtctccagccaccctgtctttgtctccaggggaaagagccaccctctcctgcagggccagtcagagtgttagcagctacttagcctggtaccaacagaaacctggccaggctcccaggctcctcatctatgatgcatccaacagggccactggca

SEQ ID NO: 1099 - DNA, 948 bp, Homo sapiens
aggaactgctcagttaggacccagagggaaccatggaagccccagctcagcttctcttcctcctgctactctggctcccagataccaccggagaaattgtgttgacacagtctccagttttcctgtctttgtctccaggggaaggagccaccctctcctgcagggccagtcagagtgttagcagaaacttagcctggtaccaacagaaatctggccaggctcccaggctcctcatctacgatgcatccaacagggccactggcatcccagccaggttcagtggcagtgggtctgggacagacttcactctcaccatcagcagcctagagcctgaagattctgcagtttattactgtcagcagcgtagcaactgcctgatcaccttcggccaagggacacgactggagattagacgaactgtggctgcaccatctgtcttcatcttcccgccatctgatgagcagttgaaatctggaactgcctctgttgtgtgcctgctgaataacttctatcccagagaggccaaagtacagtggaaggtggataacgccctccaatcgggtaactcccaggagagtgtcacagagcaggacagcaaggacagcacctacagcctcagcagcaccctgacgctgagcaaagcagactacgagaaacacaaagtctacgcctgcgaagtcacccatcagggcctgagctcgcccgtcacaaagagcttcaacaggggagagtgttagagggagaagtgcccccacctgctcctcagttccagcctgaccccctcccatcctttggcctctgaccctttttccacaggggacctacccctattgcggtcctccagctcatctttcacctcacccccctcctcctccttggctttaattatgctaatgttggaggagaatgaataaataaagtgaatctttgcaaaaaaaaaaaaaaaaa

SEQ ID NO: 1100 - DNA, 1686 bp, Homo sapiens
ccacgcgtccgggcgtaagccaggcgtgttaaagccggtcggaactgctccggagggcacgggctccgtaggcaccaactgcaaggacccctccccctgcgggcgctcccatggcacagttcgcgttcgagagtgacctgcactcgctgcttcagctggatgcacccatccccaatgcaccccctgcgcgctggcagcgcaaagccaaggaagccgcaggcccggccccctcacccatgcgggccgccaaccgatcccacagcgccggcaggactccgggccgaactcctggcaaatccagttccaaggttcagaccactcctagcaaacctggcggtgaccgctatatcccccatcgcagtgctgcccagatggaggtggccagcttcctcctgagcaaggagaaccagtctgaaaacagccagacgcccaccaagaaggaacatcagaaagcctgggctttgaacctgaacggttttgatgtagaggaagccaagatccttcggctcagtggaaaaccacaaaatgcgccagagggttatcagaacagactgaaagtactctacagccaaaaggccactcctggctccagccggaagacctgccgttacattccttccctgccagaccgtatcctggatgcgcctgaaatccgaaatgactattacctgaaccttgtggattggagttctgggaatgtactggccgtggcactggacaacagtgtgtacctgtggagtgcaagctctggtgacatcctgcagcttttgcaaatggagcagcctggggaatatatatcctctgtggcctggatcaaagagggcaactacttggctgtgggcaccagcagtgctgaggtgcagctatgggatgtgcagcagcagaaacggcttcgaaatatgaccagtcactctgcccgagtgggctccctaagctggaacagctatatcctgtccagtggttcacgttctggccacatccaccaccatgatgttcgggtagcagaacaccatgtggccacactgagtggccacagccaggaagtgtgtgggctgcgctgggccccagatggacgacatttggccagtggtggtaatgataacttggtcaatgtgtggcctagtgctcctggagagggtggctgggttcctctgcagacattcacccagcatcaaggggctgtcaaggccgtagcatggtgtccctggcagtccaatgtcctggcaacaggagggggcaccagtgatcgacacattcgcatctggaatgtgtgctctggggcctgtctgagtgccgtggatgcccattcccaggtgtgctccatcctctggtctccccattacaaggagctcatctcaggccatggctttgcacagaaccagctagttatttggaagtacccaaccatggccaaggtggctgaactcaaaggtcacacatcccgggtcctgagtctgaccatgagcccagatggggccacagtggcatccgcagcagcagatgagaccctgaggctatggcgctgttttgagttggaccctgcgcggcggcgggagcgggagaaggccagtgcagccaaaagcagcctcatccaccaaggcatccgctgaagaccaacccatcacctcagttgttttttatttttctaataaagtcatgtctcccttcatgtttttttttttaaaa

SEQ ID NO: 1101 - DNA, 416 bp, Homo sapiens; identical to SEQ ID NO: 974

SEQ ID NO: 1102 - DNA, 4668 bp, Homo sapiens
cagacatacacacacacacagacatacacagacacacacacagacacacaatcacacacatcccctccccgccacagagacacaccattacacacacagacacacacagaaagacacacatacacacaatcacacacaccctcttcttgccacagagacgcaccattacatacacagacacagacacacagagacacagacacacaaacatagacacacacacacagacacacaccagacacgcaaagacacacagacacagatacacagatacaaagacacagacatatagacacacagacatgcacagagacacatggagacacatgcaaaaatgcacagagaaagacatacagaagtgtacacacagacacatagaccacacagacacacagacatgcatgcaaacacacagacatgcagacatgcacacaaacacagactcacgcacacagacttaggcagcccaaattcagcgcctggggcataagttcctggaggggtggccaccttcagcccccacggtaaggtcctgaggaaccttccccttagacaagggatcatggaggaggtctcttccggagcctggagggaggcctcaagtggtccttccacctcggcatcccaaagtgctaggattataagcatgagccactgcacctggccccaacatcatttattgaacagactgtcgtttccacattgtgtttcttggcatttctgtcaaaaatcagttgaccgtaaatgcatggattcacttccgggctctctattctgtttcattggtctgtttgtttttatgccaataccatgatgttttgattattatagctttatagtatatcttgaagttaggtagtgtattgtctccagctttgttctttttgcttaagattgctttggctatttaggggtctttgtggccattactgacagttaaaatggccctggctcatgtctcctgggcctctacagtactttaggtggggaagtactgtggcccacatgtcccaacaggctgtgtgtggcacctgacagtgctttgtgccactgtggagcaggtgttactccctcatacgaattttaggattattttatttatttcagtgaaaaatgtcaatgaaattttgatagggattgcattgaatctgtagattgtttggggttgtatggacattttaacaatattaattcttccaattcatgaacatgggatgtcttttttttggcacctgatctcagatatgggacagctttctaattatttgtatcttcaatttctttcacaaatgttttatagttttcagcatacagatctttcacttccttggttggatttatttgcaagtattttttgtagctattgtaaatgacattgttttcttgatttctttgttagggtatagaaatgctacagattgttgtatgttaattttatatcctgcaactttactgatttcatttattctaacatcttattggtggaatctttagggttttctataagatcatgtcatctgtaaacagggacaatttaagttcttcctttccaatttggataccttttatttcttcctcttgcctaattattttggctgagggccaacttgttgggtttgttgttgttggtttttgtctgtgtcttttggtgtttcgtgttgctggcttttccagcacacagtcacagatatatgaggcagaaagaaaacccagggaactcctgtcatgtcattcctcaggtcccaaggtccctacatggtctgccttcttctctccaccttttagtgtttgatatacatacgtttatgtatgtagttatatatgtatgtgtaatacccagggaaatatacagagattttaactgtccttagtgtagggcgtggggacaggtgcatctattctaccttgcctggaagtggaaaaatcttcaagaaatcaatttatcaccaactggcatgacagaactcctggtttagtgtctagctgtctccactaaaatcaatcaccatgccatcaggcactctcttccctctggtgtgtactggtacctgaaacagcgtccagcaccctgagagcacagaacgcagcttcttatgtgccccacccaataatcccaaatcgagcacagacctgggagctgaagagacaagctggaggtcaggcagttctattacttaagcctggttcttcctgactccaaaagccaggcgccaccccatgctccttcccagcagaagctggttttcaccgggtcaggaggacaggatggctattcctgaccgttgtacagcagtgccacatctcctagtttccagaacatttaatgtgttgctgtggaggcctggcagctctgaagtagccccttgcgcccaggacaaaccgggcctggaggggtggggtggggtaagctgaagcttccagtatcccacgtgggcattctgttgctgagggcaaccgcccctccctgcaagggaggggaaggagcaggcaggcacacccttcctccctccacatttcactggagttgacctgtgtcctactgtggttgcacctggaccagcccagagggactggagtgactcttcccgcaggtagggcacagccagcctgggcacagggcctcactgcaatccctgcgccccgcctccctgggggatttccaggggttgtcctgctgcttggtgagctgggggtgtgggggaccacagatgaggcaggcgcctaaattgcttgggcggagtccggctgctctctccctccaggccctttcctgtgtcctcgggcccctcgggtccctgcaccaggccagcagcaatcgggtgtcagaggttcaagtccaggctgactcctgggacgcaccgactttgcccaggagggctggggagagggcagccccaaagtgtcatctttgattattctttgtccccaaagccagccttgggcatgtgcccagcacagggagagctgctgcctctgtgggcttgagtcatttttgcttccttgcccctctctgctctgtttggtttaaaaaacaaaaaccaacacccatgggtgaggcgaggcgaggcgaggcttgccttgatccgcccgcttcctcccctgcagcctcgggccccatcctcccgcgtggccgcactaggggtgctgggggcggagtggggaccagacctgagtgggttctgggttcagcttcgcagcaggagcagctggggcatcatcagttgggcaggtgacccaggatctgagcaggaatcttccaggtggaggtggggccgcccctctgcttgccacagctgccttctgctctgggggcagcactggctgagaatccagtgaagtaaggcctttgaaatggttttgattgtaaaagtaatgtttatgtttagccattcctttttttattttttattttttgagacgggtctccctctgtcacccaggctggagtgcagtcgtgaaatgtgggctcactgcaacctccacctcccaggttcaagtgattctcctgcctcagcctcctgagtagttgggattacaagtgcctgccaccacacctgactaagttttgtattttttagtagagatggagtttcaccatgttggccaggctggtctcaaactcatatcctcaagtgatccaccctcctcgtcctcccaaagtgctgggattttgccatgagccaccacgctcagccatgtttagccatttttaaaaggtgtgaacagataattaagtctattagcaacattagaaaatttaagttaaaatttaaatgactctagcaagaattagcctttaggtgccctgggtccccctcctcaccgccccccaccccgccgccttctgagaagcgttttgtaatttttcttatttataaaatgggtttgattcaaaactgacttttcctcttcacagtctcacaggtccttccccaggtccaagaggctcttctgtgtcctgatgacaagtagctgcctagccgtggtggcacctcctatcacatgttaagggacccctccccagggccacacctggcagaaggtggcttatgatgttcgcagcttgaaagtagtgtaaaccaaagataaaattctaagcccactcccccagccatcggaatggacccctcctcttggccagggcactccaaagttaacctgaaaaaccggttcaggctgtgaagagaaggtggagtggacatgcctcatttatgtcctcctcccttttggaattcagcaaagctgaccagcatgaacattaacacagaccttaagtctgattagtggcatttacaatctatactctctgaagcgtgctacctggagtcttcctttgcatgataaaactttggtctccacaaccccttatcataacctagacactcctttctagtgataataactctttcaaccaattgccaataaaaaaattttgaatctacctataacctggaacctccccgctccaccttcgagttgtcctacctttctggacagaagcaatgtggatcttgcatgtatttgattgatgtctcatgtctccctaaaacgtatacaattaggctgtgcccagatcaccctgggcacatgttctcaggccctcctgaggtctctgtctcgggccattggtcactcagattcggctcagaataaatctcttcaaatatt

SEQ ID NO: 1103 - DNA, 822 bp, Homo sapiens
aacagatgtgcctgcattcagtgaaagagtgcaaatattaagtccttgtgacttcaactgactcttccaaattgtatgaatttgtcggtgtgttggataaactcagttccagagttgtggggaagggctgttggaccaacgaatgtggctagttggcagctggaaatcgtaccgctgttgattggccaccttatttggtctggcagtttttctttataattctgaaactgggtttacctaatacattgataaattatttcaaaggtatttttatagttcaaatcacttcacttttaccctgataaatataaatgactaggaatgatcttcagctagcctttagcacctgcaaccaatctgacaataatgtgttcatcaggtacctgtggattaaatcacacaccggcatatttaagctgaatgtcagtctggaaaatgaatgtactatattaactgaaataccactctttgtgtaggtattctgtcatatatttaagaaaaattaaatagcatgtaaatcatataacaataacttaagtctttcttcaaagtgcatgtggtcctttgcaatacctcattcagccaagtatttgttctcttcctcattcagtttaaggcagctttcaatttgcttagaaggcaacattagaagggtagagtttaatcagaaacatagaattttaaagtgtgggttcaactgaataaatttgaatttctgtaggaagtaaagaattaaaaatctatttaaagattgcaatatataatcatttttaaagtatttggttaacctgatgggttttccagaaatgaaaacaagtcagt

SEQ ID NO: 1104 - DNA, 4067 bp, Homo sapiens
agaagagctgctcagttaggacccagagggaaccatggaaaccccagcgcagcttctcttcctcctactactctggctcccagagacttccggggaatttgtgttgacgcagtctccaggcaccctgactttgtctccaggggagacagccaccctctcctgcaggaccagtcagtctgttaggagcgtctacatagcctggtatcaacagaaacctggccaggcccccaggcccgtcatacatggcggctcttccagggccactgacatcccggacaggttcagtggcagtgggtctgggacagaattcactctcaccatcaacagactggagcctgaagattttgcagtctactattgtcagcagtatggtaggtctgtcactttcggcggagggaccaaggttgagatcaaacgtaagtgcactttcctaagtcttcttcttataaggtttttaaatttaggactgaggaatcgagaattagttcatcttaaggaacagtcaagcgctagacagttaagtgaggcatctcaatggtcagattttctctgcatcggtcaggttagtgatattaacagcgaaaagacatttttgttagggggaaagttatgaagttaacactgtggatcatattcggccaagggacacgcctggagatgaaatgtaagcaacctttcagtattgtcttctgaaatttggctctgacggccagtcttgacttccagaggcttgaagaggagtttggtaaatattggtaaatgagggcatttaagatttgccatgggttgcaaaagttcaactcagcttcaaaaatggatttggagaaatatagcttaaattgctctaaactgaatgacacaaagtcaaaaaaaaaaagtgtaactaaaaaggaacccttgtatttctaaggagcaaaagtaaatttatttttgttcactcttgccaaatattgtattggttgttgctgattatgcatgatacagaaaagtgtaaaaatacattttttagtctttctcccttttgtttgataaattattttgtcagacaagtataaaaatcaatagcacgccctaagaaaaatcagggaaaagtgaagtgtacctatttgctatgtagaagaggcagcttacttgaaaatcagcagcaatgttgtttttagagtctgtaataagtaataaagtcaaaaagacacattctataggaataagggcctcacaggtagagctcattttttaaaaatcccatttgtacaatagactaaacgtgaaattatctcttattgtaatggtggaaaggtggttattcccaaaagctcaatctcagagaaatgtgtttaaatgaaaaaaagaaaataaatgcattttttaatgaccgtgggtctgtgaaaaaaataggaaatattttaaagagtatgttctttcattatcctctgttatttcttgtctacatttttattctgtcaagaaggccgtggcaccgcgagctgtagacagagccgcggtctttctcgattgagtggctttggtggccatgccaccgcgctcttggggcagccgccttgccgcaagtggccgtggccaccctgtgtctgcccgattaatgctgccgtagccagctttcctgatgcacagtgatacaaataatgccactaagggaaagagaacagaaacgtaatgggcgctgagctgggaaagccagggagaagactgatttattagagatttcagaaataaaattcacattcattatgatatctcattagtgaaaatttccattaggggattgtaaataatttaaagcttttttttttttcagtgctatttaattatttcaatatcctctcatcaaatgtatttaaataacaaaagctcaaccaaaaagaaagaaatatgtaattctttcagagtaaaaatcacacccatgacctggccactgagggcttgatcaattcactttgaatttggcattaaataccattaaggtatattaactgattttaaaataagatatattcgtgaccatgtttttaactttcaaaaatgtagctgccagtgtgtgattttatttcagttgtacaaaatatctaaacctatagcaatgtgattaataaaaacttaaacatattttccagtaccttaattctgtgataggaaaattttaatctgagtattttaatttcataatctctaaaatagtttaatgatttgtcattgtgttgctgtcgtttaccccagctgatctcaaaagtgatatttaaggagattattttggtctgcaacaacttgataggactattttagggcctttttaaagctctattaaaactaacttacaacgattcaaaactgttttaaactatttcaaaatgattttagagccttttgaaaactcttttaaacactttttaaactctattaaaactaataagataacttgaaataattttcatgtcaaatacattaactgtttaatgtttaaatgccagatgaaaaatgtaaagctatcaagaattcacccagataggagtatcttcatagcatgtttttccctgcttattttccagtgatcacattattttgctaccatggttattttatacaattatctgaaaaaaattagttatgaagattaaaagagaagaaaatattaaacataagagattcagtctttcatgttgaactgcttggttaacagtgaagttagttttaaaaaaaaaaaaaaactatttctgttatcagctgacttctccctatctgttgacttctcccagcaaaagattcttattttacattttaactactgctctcccacccaacgggtggaatcccccagagggggatttccaagaggccacctggcagttgctgagggtcagaagtgaagctagccacttcctcttaggcaggtggccaagattacagttgacctctcctggtatggctgaaaattgctgcatatggttacaggccttgaggcctttgggagggcttagagagttgctggaacagtcagaaggtggaggggctgacaccacccaggcgcagaggcagggctcagggcctgctctgcagggaggttttagcccagcccagccaaagtaacccccgggagcctgttatcccagcacagtcctggaagaggcacaggggaaataaaagcggacggaggctttccttgactcagccgctgcctggtcttcttcagacctgttctgaattctaaactctgagggggtcggatgacgtggccattctttgcctaaagcattgagtttactgcaaggtcagaaaagcatgcaaagccctcagaatggctgcaaagagctccaacaaaacaatttagaactttattaaggaatagggggaagctaggaagaaactcaaaacatcaagattttaaatacgcttcttggtctccttgctataattatctgggataagcatgctgttttctgtctgtccctaacatgccctgtgattatccgcaaacaacacacccaagggcagaactttgttacttaaacaccatcctgtttgcttctttcctcaggaactgtggctgcaccatctgtcttcatcttcccgccatctgatgagcagttgaaatctggaactgcctctgttgtgtgcctgctgaataacttctatcccagagaggccaaagtacagtggaaggtggataacgccctccaatcgggtaactcccaggagagtgtcacagagcaggacagcaaggacagcacctacagcctcagcagcaccctgacgctgagcaaagcagactacgagaaacacaaagtctacgcctgcgaagtcacccatcagggcctgagctcgcccgtcacaaagagcttcaacaggggagagtgttagagggagaagtgcccccacctgctcctcagttccagcctgaccccctcccatcctttggcctctgaccctttttccacaggggacctacccctattgcggtcctccagctcatctttcacctcacccccctcctcctccttggctttaattatgctaatgttggaggagaatgaataaataaagtgaatctttgc

SEQ ID NO: 1105 - DNA, 910 bp, Homo sapiens
cgcagaaggcaggactcgggacaatcttcatcatgacctgctcccctctcctcctcacccttctcattcactgcacagggtcctgggcccagtctgtgttgacgcagccgccctcagtgtctgcggccccaggacagagggtcaccatctcctgctctggaaggagctccaacattggaaatagttatgtgtcctggtatcagcagttcccaggagcagccccccaactcctcatttatgacaatgataagcgaccctcagggattcctgaccgattctctggctccaagtctggcacgtcagccaccctggccatcaccggactccagactgaggacgaggccgaatactactgcggaacatgggataccagcctgactgctggggttttcggcggtgggaccaaactgaccgtcctaagtcagcccaaggctgccccctcggtcactctgttcccgccctcctctgaggagcttcaagccaacaaggccacactggtgtgtctcataagtgacttctacccgggagccgtgacagtggcctggaaggcagatagcagccccgtcaaggcgggagtggagaccaccacaccctccaaacaaagcaacaacaagtacgcggccagcagctatctgagcctgacgcctgagcagtggaagtcccacagaagctacagctgccaggtcacgcatgaagggagcaccgtggagaagacagtggcccctacagaatgttcataggttctaaaccctcaccccccccacgggagactagagctgcaggatcccaggggaggggtctctcctcccaccccaaggcatcaagcccttctccctgcactcaataaaccctcaataaatattctcattgtcaatcagaaaaaaaaaaaaaaaaaaaaaaaaaaaaaaaa

SEQ ID NO: 1106 - DNA, 3024 bp, Homo sapiens
ctataaaggatcacgcgccccagtcgacgctgagctcctctgctactcagagttgcaacctcagcctcgctatggctcccagcagcccccggcccgcgctgcccgcactcctggtcctgctcggggctctgttcccaggacctggcaatgcccagacatctgtgtccccctcaaaagtcatcctgccccggggaggctccgtgctggtgacatgcagcacctcctgtgaccagcccaagttgttgggcatagagaccccgttgcctaaaaaggagttgctcctgcctgggaacaaccggaaggtgtatgaactgagcaatgtgcaagaagatagccaaccaatgtgctattcaaactgccctgatgggcagtcaacagctaaaaccttcctcaccgtgtactggactccagaacgggtggaactggcacccctcccctcttggcagccagtgggcaagaaccttaccctacgctgccaggtggagggtggggcaccccgggccaacctcaccgtggtgctgctccgtggggagaaggagctgaaacgggagccagctgtgggggagcccgctgaggtcacgaccacggtgctggtgaggagagatcaccatggagccaatttctcgtgccgcactgaactggacctgcggccccaagggctggagctgtttgagaacacctcggccccctaccagctccagacctttgtcctgccagcgactcccccacaacttgtcagcccccgggtcctagaggtggacacgcaggggaccgtggtctgttccctggacgggctgttcccagtctcggaggcccaggtccacctggcactgggggaccagaggttgaaccccacagtcacctatggcaacgactccttctcggccaaggcctcagtcagtgtgaccgcagaggacgagggcacccagcggctgacgtgtgcagtaatactggggaaccagagccaggagacactgcagacagtgaccatctacagctttccggcgcccaacgtgattctgacgaagccagaggtctcagaagggaccgaggtgacagtgaagtgtgaggcccaccctagagccaaggtgacgctgaatggggttccagcccagccactgggcccgagggcccagctcctgctgaaggccaccccagaggacaacgggcgcagcttctcctgctctgcaaccctggaggtggccggccagcttatacacaagaaccagacccgggagcttcgtgtcctgtatggcccccgactggacgagagggattgtccgggaaactggacgtggccagaaaattcccagcagactccaatgtgccaggcttgggggaacccattgcccgagctcaagtgtctaaaggatggcactttcccactgcccatcggggaatcagtgactgtcactcgagatcttgagggcacctacctctgtcgggccaggagcactcaaggggaggtcacccgcaaggtgaccgtgaatgtgctctccccccggtatgagattgtcatcatcactgtggtagcagccgcagtcataatgggcactgcaggcctcagcacgtacctctataaccgccagcggaagatcaagaaatacagactacaacaggcccaaaaagggacccccatgaaaccgaacacacaagccacgcctccctgaacctatcccgggacagggcctcttcctcggccttcccatattggtggcagtggtgccacactgaacagagtggaagacatatgccatgcagctacacctaccggccctgggacgccggaggacagggcattgtcctcagtcagatacaacagcatttggggccatggtacctgcacacctaaaacactaggccacgcatctgatctgtagtcacatgactaagccaagaggaaggagcaagactcaagacatgattgatggatgttaaagtctagcctgatgagaggggaagtggtgggggagacatagccccaccatgaggacatacaactgggaaatactgaaacttgctgcctattgggtatgctgaggccccacagacttacagaagaagtggccctccatagacatgtgtagcatcaaaacacaaaggcccacacttcctgacggatgccagcttgggcactgctgtctactgaccccaacccttgatgatatgtatttattcatttgttattttaccagctatttattgagtgtcttttatgtaggctaaatgaacataggtctctggcctcacggagctcccagtcctaatcacattcaaggtcaccaggtacagttgtacaggttgtacactgcaggagagtgcctggcaaaaagatcaaatggggctgggacttctcattggccaacctgcctttccccagaaggagtgatttttctatcggcacaaaagcactatatggactggtaatggttacaggttcagagattacccagtgaggccttattcctcccttccccccaaaactgacacctttgttagccacctccccacccacatacatttctgccagtgttcacaatgacactcagcggtcatgtctggacatgagtgcccagggaatatgcccaagctatgccttgtcctcttgtcctgtttgcatttcactgggagcttgcactatgcagctccagtttcctgcagtgatcagggtcctgcaagcagtggggaagggggccaaggtattggaggactccctcccagctttggaagcctcatccgcgtgtgtgtgtgtgtgtatgtgtagacaagctctcgctctgtcacccaggctggagtgcagtggtgcaatcatggttcactgcagtcttgaccttttgagctcaagtgatcctcccacctcagcctcctgagtagctgggaccataggctcacaacaccacacctggcaaatttgattttttttttttttccagagacggggtcttgcaacattgcccagacttcctttgtgttagttaataaagctttctcaactgccaaaaaaaaaaaaaaaaaaaaaaaaaa

SEQ ID NO: 1107 - DNA, 948 bp, Homo sapiens
gtctcagtcaggacacagcatggacatgagggtccccgctcagctcctggggctcctgctactctggctccgaggtgccagatgtgacatccagatgacccagtctccatcctccctgtctgcatctgttggagacagagtcaccatcacttgccgggcaagtcagaacattaacaactatttaaattggtatcaactgaagccaggcaaagcccctaacctcctgatctatgctgcatccagtttgcaaagtggggtcccatcaaggttcagtggcagtggatctgggacagatttcactctcaccatcagcagtctgcgacctgacgattttgcaacttactactgtcaacagagttacaatatccctctcactttcggcggagggaccaacgtggagatcaaacgaactgtggctgcaccatctgtcttcatcttcccgccatctgatgagcagttgaaatctggaactgcctctgttgtgtgcctgctgaataacttctatcccagagaggccaaagtacagtggaaggtggataacgccctccaatcgggtaactcccaggagagtgtcacagagcaggacagcaaggacagcacctacagcctcagcagcaccctgacgctgagcaaagcagactacgagaaacacaaagtctacgcctgcgaagtcacccatcagggcctgagctcgcccgtcacaaagagcttcaacaggggagagtgttagagggagaagtgcccccacctgctcctcagttccagcctgaccccctcccatcctttggcctctgaccctttttccacaggggacctacccctattgcggtcctccagctcatctttcacctcacccccctcctcctccttggctttaattatgctaatgttggaggagaatgaataaataaagtgaatctttgcacctgtaaaaaaaaaaaaaaaaaa

SEQ ID NO: 1108 - DNA, 4098 bp, Homo sapiens
cggacgcgtgggccggagctcggggaggcgaggcgggagccctgagctgaggccgggcagcgcggacccgcgcaggaggaggcggcggggacaccggcgagtccccagcagggcccctgggctcccggaagggtctccagccacctgcccttcccgagaagagagagctctgggccttcttcctgccagtctggtcttcgagtgcgttcaggacagatagaccttggcacaggctgccccgagattcctgcgacgctgtctgttcctgccttctgtggagcatggcacccacaggcttccaggacggatcatagacccgagcctccaggagggcgccctgtgcggctcactgcgcggtccctctcagctcccctgccacccagcctccgaggccggctcctgtcacggaaatgccctcgggcacctggatgaggccatcccagagcgggacccaactgtgccacccaccaagcctccccctgcgccccccgtgccctcgcatgtccggctgccagggcagactgtagaatgtctgtgccccagatccacgtggaagaagtgggtgcagaagagggggcgggagcagccgcaccacccgatgaccacctccggagcctgaaggccctcaccgagaaactgaggctggagacccgcaggccctcctacctggaatggcaggccaggctggaggagcagacctggcccttcccgaggccggctgcggagccacaggcgagcttggaggagggggagcgtggggggcaggagcccttgctccccctgagagaggctgggcagcaccccccttctgccaggagtgccagccaaggtgccagacccctgtccactggcaagctggaaggctttcagagcatcgatgaagctatagcctggctcaggaaggaactgacggagttgcggctgcaggaccagcaactggccagacagctcatgcgcctgcgtggcgacatcaacaagctgaaaatcgaacacacctgccgcctccacaggaggatgctcaacgatgccacctacgagctggaggagcgggatgagctggccgacctcttctgtgactcccctcttgcctcctccttcagcctctccacaccactcaagcttattggcgtgaccaagatgaacatcaactctcggaggttctctctctgctgaggagccctcagactgggcggaggggctggagcggagggcttgggctggaggggtgtcagaggaagctgaggccaagttactccagtgggtctcccggaggcaggggtccctgggactggcgactcaagggccccaggacctattcagtggtgctctcccacccaggggccctgggtgtggatgccagtgtctctgtgactggctcttgcttactacccaaagagctctgcagaagggccgctccaaccaagatgttaaaggagacctgggttcccaccataatccatccctccacggtcacgttcctgtttcctggaatcactggtgctatgaactgggattcccaaagggaggccccccaacaaagctgtcatttttgcagaaggctgtcccgcaagggccttgggggaaattaggcatgtcagatgtgcctgtctcacatgctgttgctgtcctctaagtattgtctcaaattcaccctaagtacatgactcagcaacattgacagggagctactaggaagggaaaatcgaaaggcatgacaaatgggcacttggggacgcagccccagtggctggcagccagtgtctctggtgagcctgacactacaaggctgtgtaaattgtaaattctggcgtgtgctgggacatgtgatgggggcactagcgtagcttgggtgcaacaagcacagatgtccccattgtctcccctggccacatgcatctccaaagagcctcttcactgccacccacaccccagggtgacagcctgggagaccactggtgactgaaccaggcaggtcctgaaagcattttccataactgaattctcctgcaggggcgtgaccggggcctcctggtggattctggtggtgtcaccttactgccctctctggaaagacaatctagggagcccagaggcccatcctgagcctcctctgagattttgtgcctgacctaaacaactagttttaataagactgttactgatgtgttgctcacttgttagtaactgatttttgtccaaatgcggaagccacttgtgtaggtcaactacagtgcgtaggatttgattttaagagtttctccctcccaacaggcttgaggatcagcaagttaagaccccagcaggttagggaggtcagtctggggtcatacggcatggcaggggtccctcggccagacccgtagaatcctgagataaggagtgtttctgacctttggtgtcatctagtcgagtcctctcattagtaaaggagcaaagtgaaacctgggggaggagaaggacttccctcaggttgcacagctgtttaggctatagaatattgatgtgtgaaaccattattgataatgcctagtagatcacatgtcaatgaacttgaaccccaaagatggtcgtgatgctttgccaaacccgcacactgccaacccctctactctccacctcagcccccacccacatctcccagagtattgcaattcagaacatttgggtcaaggtggagcaaggcactgacagtggccccacagggcatgtgtcactaatcactgtcccatggtctacgcacggcatctggctgctctgtctactgtgacttcttcctgtgtaatctcagtggggcccgtgtccacccacacatcgtgacccacataggggagaggttgcttttcttttgtgggctgagagtaggacaatgcaaatgaatgatctctagtagacagaaaagaacttggtctcttttttaaaatttcaaagagccagaagttctatgcctccttcaaagtaggcagaacaacgcagccaagatctactgtctgccatgctctgtgcaatgaagtctgcaggcctgaggaccatgtactgctgtccttcctcagagctctgcacaaacactgccaagtcctgaagacgcattcctttcctgccaacctctttccagataagcccttgaggtctcgggctgacctacacacacacacacacacacacacacccccccccacacacacacacgacagagaacatgccataaacatccttgaacccatgcaggaaagcccatcccatattctgaaaaaatgccaaattaggtttttctttctttttggaaatcagtcattacagtaaccgaaaccattgggttcagcgaaaatggaaagatttagctgaatgtagtcagtccaattaagttggatgcaactgagtgatttagttgcttgggtaacccagtgcttgcttgctttcttcattctctgggtggaaactaagatcaagacacatgtttggggataagttaaatgtctgagctattttgctcggtttatcctaagagaactttattatgggatgaggaggtgacccaagatgagaagtggagggggacagcgatgttttctaaacatcgtccagtgttgactggcttccttactttgcacagtgaacacaactaaccacattaattcagctttgtgaagtccctgctctctgtgggtctatgagtcagcagcaacattggcctaacctccgtcccagcctcctggctcaccacatgtgtacagtgctgtttgcagttgtactcattatccatccatctctctgccatccccaagcatcgctgggtgtaaaacgcaaactctccaccgacactgccatgcgtggtcatgtcttgatgccttcaggggctcagtagctatcaaagaggcctggagggcctgggcaggcttgacgatgcctgaccgagttcaagacccacaccctgtagcaataccaagtgctattacataatcaatggacgatttatacttttattttttatgattatttgtttctatattgctgttagaaaaagtgaaataaaaatacttcaaaagaagatatccatataaaaataaaaggagagaaaaatgaaaaaaaaaaaaaaaaaaa

SEQ ID NO: 1109 - DNA, 5777 bp, Homo sapiens
gcggacactcctctcggctcctccccggcagcggcggcggctcggagcgggctccggggctcgggtgcagcggccagcgggcctggcggcgaggattacccggggaagtggttgtctcctggctggagccgcgagacgggcgctcagggcgcggggccggcggcggcgaacgagaggacggactctggcggccgggtcgttggccgggggagcgcgggcaccgggcgagcaggccgcgtcgcgctcaccatggtcagctactgggacaccggggtcctgctgtgcgcgctgctcagctgtctgcttctcacaggatctagttcaggttcaaaattaaaagatcctgaactgagtttaaaaggcacccagcacatcatgcaagcaggccagacactgcatctccaatgcaggggggaagcagcccataaatggtctttgcctgaaatggtgagtaaggaaagcgaaaggctgagcataactaaatctgcctgtggaagaaatggcaaacaattctgcagtactttaaccttgaacacagctcaagcaaaccacactggcttctacagctgcaaatatctagctgtacctacttcaaagaagaaggaaacagaatctgcaatctatatatttattagtgatacaggtagacctttcgtagagatgtacagtgaaatccccgaaattatacacatgactgaaggaagggagctcgtcattccctgccgggttacgtcacctaacatcactgttactttaaaaaagtttccacttgacactttgatccctgatggaaaacgcataatctgggacagtagaaagggcttcatcatatcaaatgcaacgtacaaagaaatagggcttctgacctgtgaagcaacagtcaatgggcatttgtataagacaaactatctcacacatcgacaaaccaatacaatcatagatgtccaaataagcacaccacgcccagtcaaattacttagaggccatactcttgtcctcaattgtactgctaccactcccttgaacacgagagttcaaatgacctggagttaccctgatgaaaaaaataagagagcttccgtaaggcgacgaattgaccaaagcaattcccatgccaacatattctacagtgttcttactattgacaaaatgcagaacaaagacaaaggactttatacttgtcgtgtaaggagtggaccatcattcaaatctgttaacacctcagtgcatatatatgataaagcattcatcactgtgaaacatcgaaaacagcaggtgcttgaaaccgtagctggcaagcggtcttaccggctctctatgaaagtgaaggcatttccctcgccggaagttgtatggttaaaagatgggttacctgcgactgagaaatctgctcgctatttgactcgtggctactcgttaattatcaaggacgtaactgaagaggatgcagggaattatacaatcttgctgagcataaaacagtcaaatgtgtttaaaaacctcactgccactctaattgtcaatgtgaaaccccagatttacgaaaaggccgtgtcatcgtttccagacccggctctctacccactgggcagcagacaaatcctgacttgtaccgcatatggtatccctcaacctacaatcaagtggttctggcacccctgtaaccataatcattccgaagcaaggtgtgacttttgttccaataatgaagagtcctttatcctggatgctgacagcaacatgggaaacagaattgagagcatcactcagcgcatggcaataatagaaggaaagaataagatggctagcaccttggttgtggctgactctagaatttctggaatctacatttgcatagcttccaataaagttgggactgtgggaagaaacataagcttttatatcacagatgtgccaaatgggtttcatgttaacttggaaaaaatgccgacggaaggagaggacctgaaactgtcttgcacagttaacaagttcttatacagagacgttacttggattttactgcggacagttaataacagaacaatgcactacagtattagcaagcaaaaaatggccatcactaaggagcactccatcactcttaatcttaccatcatgaatgtttccctgcaagattcaggcacctatgcctgcagagccaggaatgtatacacaggggaagaaatcctccagaagaaagaaattacaatcagagatcaggaagcaccatacctcctgcgaaacctcagtgatcacacagtggccatcagcagttccaccactttagactgtcatgctaatggtgtccccgagcctcagatcacttggtttaaaaacaaccacaaaatacaacaagagcctggaattattttaggaccaggaagcagcacgctgtttattgaaagagtcacagaagaggatgaaggtgtctatcactgcaaagccaccaaccagaagggctctgtggaaagttcagcatacctcactgttcaaggaacctcggacaagtctaatctggagctgatcactctaacatgcacctgtgtggctgcgactctcttctggctcctattaaccctccttatccgaaaaatgaaaaggtcttcttctgaaataaagactgactacctatcaattataatggacccagatgaagttcctttggatgagcagtgtgagcggctcccttatgatgccagcaagtgggagtttgcccgggagagacttaaactgggcaaatcacttggaagaggggcttttggaaaagtggttcaagcatcagcatttggcattaagaaatcacctacgtgccggactgtggctgtgaaaatgctgaaagagggggccacggccagcgagtacaaagctctgatgactgagctaaaaatcttgacccacattggccaccatctgaacgtggttaacctgctgggagcctgcaccaagcaaggagggcctctgatggtgattgttgaatactgcaaatatggaaatctctccaactacctcaagagcaaacgtgacttattttttctcaacaaggatgcagcactacacatggagcctaagaaagaaaaaatggagccaggcctggaacaaggcaagaaaccaagactagatagcgtcaccagcagcgaaagctttgcgagctccggctttcaggaagataaaagtctgagtgatgttgaggaagaggaggattctgacggtttctacaaggagcccatcactatggaagatctgatttcttacagttttcaagtggccagaggcatggagttcctgtcttccagaaagtgcattcatcgggacctggcagcgagaaacattcttttatctgagaacaacgtggtgaagatttgtgattttggccttgcccgggatatttataagaaccccgattatgtgagaaaaggagatactcgacttcctctgaaatggatggctcccgaatctatctttgacaaaatctacagcaccaagagcgacgtgtggtcttacggagtattgctgtgggaaatcttctccttaggtgggtctccatacccaggagtacaaatggatgaggacttttgcagtcgcctgagggaaggcatgaggatgagagctcctgagtactctactcctgaaatctatcagatcatgctggactgctggcacagagacccaaaagaaaggccaagatttgcagaacttgtggaaaaactaggtgatttgcttcaagcaaatgtacaacaggatggtaaagactacatcccaatcaatgccatactgacaggaaatagtgggtttacatactcaactcctgccttctctgaggacttcttcaaggaaagtatttcagctccgaagtttaattcaggaagctctgatgatgtcagatatgtaaatgctttcaagttcatgagcctggaaagaatcaaaacctttgaagaacttttaccgaatgccacctccatgtttgatgactaccagggcgacagcagcactctgttggcctctcccatgctgaagcgcttcacctggactgacagcaaacccaaggcctcgctcaagattgacttgagagtaaccagtaaaagtaaggagtcggggctgtctgatgtcagcaggcccagtttctgccattccagctgtgggcacgtcagcgaaggcaagcgcaggttcacctacgaccacgctgagctggaaaggaaaatcgcgtgctgctccccgcccccagactacaactcggtggtcctgtactccaccccacccatctagagtttgacacgaagccttatttctagaagcacatgtgtatttatacccccaggaaactagcttttgccagtattatgcatatataagtttacacctttatctttccatgggagccagctgctttttgtgatttttttaatagtgctttttttttttgactaacaagaatgtaactccagatagagaaatagtgacaagtgaagaacactactgctaaatcctcatgttactcagtgttagagaaatccttcctaaacccaatgacttccctgctccaacccccgccacctcagggcacgcaggaccagtttgattgaggagctgcactgatcacccaatgcatcacgtaccccactgggccagccctgcagcccaaaacccagggcaacaagcccgttagccccaggggatcactggctggcctgagcaacatctcgggagtcctctagcaggcctaagacatgtgaggaggaaaaggaaaaaaagcaaaaagcaagggagaaaagagaaaccgggagaaggcatgagaaagaatttgagacgcaccatgtgggcacggagggggacggggctcagcaatgccatttcagtggcttcccagctctgacccttctacatttgagggcccagccaggagcagatggacagcgatgaggggacattttctggattctgggaggcaagaaaaggacaaatatcttttttggaactaaagcaaattttagacctttacctatggaagtggttctatgtccattctcattcgtggcatgttttgatttgtagcactgagggtggcactcaactctgagcccatacttttggctcctctagtaagatgcactgaaaacttagccagagttaggttgtctccaggccatgatggccttacactgaaaatgtcacattctattttgggtattaatatatagtccagacacttaactcaatttcttggtattattctgttttgcacagttagttgtgaaagaaagctgagaagaatgaaaatgcagtcctgaggagagttttctccatatcaaaacgagggctgatggaggaaaaaggtcaataaggtcaagggaagaccccgtctctataccaaccaaaccaattcaccaacacagttgggacccaaaacacaggaagtcagtcacgtttccttttcatttaatggggattccactatctcacactaatctgaaaggatgtggaagagcattagctggcgcatattaagcactttaagctccttgagtaaaaaggtggtatgtaatttatgcaaggtatttctccagttgggactcaggatattagttaatgagccatcactagaagaaaagcccattttcaactgctttgaaacttgcctggggtctgagcatgatgggaatagggagacagggtaggaaagggcgcctactcttcagggtctaaagatcaagtgggccttggatcgctaagctggctctgtttgatgctatttatgcaagttagggtctatgtattta

SEQ ID NO: 1110 - DNA, 2493 bp, Homo sapiens
tgggctaccagtgggctcccatcctagccaacttcctgcacatcatggcagtcatcctgggcatctttggcaccgtgcagtaccgctcccggtacctcatcctgtatgcagcctggctggtgctctgggttggctggaatgcatttatcatctgcttctacttggaggttggacagctgtcccaggaccgggacttcatcatgaccttcaacacatccctgcaccgctcctggtggatggagaatgggccaggctgcctggtgacacctgttctgaactcccgcctggctctggaggaccaccatgtcatctctgtcactggctgcctgcttgactacccctacattgaagccctcagcagcgccctgcagatcttcctggcactgttcggcttcgtgttcgcctgctacgtgagcaaagtgttcctggaggaggaggacagctttgacttcatcggcggctttgactcctacggataccaggcgccccagaagacgtcgcatttacagctgcagcctctgtacacgtcggggtagcctctgccccgcgcccaccccggcgcctcgccctgggctgaccgcagctgccgcgagctcgggccaaggcgcaggcgtgtccccctggtggcccgcgctctcactgcagcctgtgcccaaccccgcgtctgcatctggagatgcggacttggacgtggacttggacttggacttggatttgagcttggctcttcgcagcccggacttcggaggagtggggcggggcgggggaggggcaccacgggttttttgttttttgtttgtttgtttttaatctcagccttggcgtgagctggggccttcctctcttctccagcctctccctttcactcttcgcccagcatcctgcccccctgtccaaaaacagcaggacatcaggcccatcccatcccaccacactcactcaccagctctggggaaagctactgtgaactaggagcaggattcctgggttctaatcgcaggtccatcactgactgtgacgtctagcaaagcccttgccctctctgagcctcggtttccgcacctcaagtaattaatcccttagcaaatggactcttttagacttctcatttaactcaattccctgagctagactgggattaaaattctcattttgcagtacattaaaactgatgcccagagatgtgatttgcttgaggccacacagctagatttttggtggaagtgggccttgaacacagtgtactttctgcagtttctgactgtaaaacccagtgtctgctctctgagttccatttccaagcccccctccatcttggacctatgtggtctccaccatattcacacaccaccaccaccacttgccaatgcctctcttaaagcaatatacccattcgttctcttattgggaactggatggatgaagccccaaattcagccccacccacagagaagccttcctacactcagcctctgtccacccttggcaaatctttcaagctctctcctccaggaaagtggggccccaactcagtcactccacccccttccaggtccctgaggctggttctactgtatccccatcacctccacaactccactcacccctgacggctccatccacctcaccagttggaaggcttgtggtttcagagaggagcaatgctggtcagcgctgcccagactccagtgtttacagatcaccagcatttacaaccaatccaatggccagaagcctcctctaacaagcccagaaggagttctgaaggggcagatgggggtgtgagtagtcggggagtcgggattgccagcaccctcacccttccttgggggcaagtagaggtgagaacactttccccacctccctccacagacactcctgaggacgctgcatcccacgcactgcctggtgcgtccatagagagaggatcaggtctcagcatttcatctgtgaaagaggcatggccctgggttagaaaggagggcaggagacatggaggaactggggggcacccagatggtgcagatggtttgcacacctgagcctgtctgtggtgaccattccgctcctctcccactaccctccaatctatcattccctactctctaaggccaaaatatcctgagcaaggctggcaaccccaccccaccatcccaaatgcaagcagccaggcccaggagttcctctggcccccacaggcatggagctcccagctggtgggtacagcttgagaggggggcagctccctcaggctaagctactgcccttcactgggccagccctgcctccagccctcacctctctcaccccaactctcccccaagcccctttctactcaacgggtgtagccactggtgctttgaagccttttgtttttataagatggtttttgcaaggggaccaggttctcttttcactgggaccttgcaaggaggggagtgctctcctggtttctgtgcaggcgggttgattaaagatggtgttttcttctct

SEQ ID NO: 1111 - DNA, 4543 bp, Homo sapiens
cggcgggcggcgcgcacactgctcgctgggccgcggctcccgggtgtcccaggcccggccggtgcgcagagcatggcgggtgcgggcccgaagcggcgcgcgctagcggcgccggcggccgaggagaaggaagaggcgcgggagaagatgctggccgccaagagcgcggacggctcggcgccggcaggcgagggcgagggcgtgaccctgcagcggaacatcacgctgctcaacggcgtggccatcatcgtggggaccattatcggctcgggcatcttcgtgacgcccacgggcgtgctcaaggaggcaggctcgccggggctggcgctggtggtgtgggccgcgtgcggcgtcttctccatcgtgggcgcgctctgctacgcggagctcggcaccaccatctccaaatcgggcggcgactacgcctacatgctggaggtctacggctcgctgcccgccttcctcaagctctggatcgagctgctcatcatccggccttcatcgcagtacatcgtggccctggtcttcgccacctacctgctcaagccgctcttccccacctgcccggtgcccgaggaggcagccaagctcgtggcctgcctctgcgtgctgctgctcacggccgtgaactgctacagcgtgaaggccgccacccgggtccaggatgcctttgccgccgccaagctcctggccctggccctgatcatcctgctgggcttcgtccagatcgggaagggtgatgtgtccaatctagatcccaacttctcatttgaaggcaccaaactggatgtggggaacattgtgctggcattatacagcggcctctttgcctatggaggatggaattacttgaatttcgtcacagaggaaatgatcaacccctacagaaacctgcccctggccatcatcatctccctgcccatcgtgacgctggtgtacgtgctgaccaacctggcctacttcaccaccctgtccaccgagcagatgctgtcgtccgaggccgtggccgtggacttcgggaactatcacctgggcgtcatgtcctggatcatccccgtcttcgtgggcctgtcctgcttcggctccgtcaatgggtccctgttcacatcctccaggctcttcttcgtggggtcccgggaaggccacctgccctccatcctctccatgatccacccacagctcctcacccccgtgccgtccctcgtgttcacgtgtgtgatgacgctgctctacgccttctccaaggacatcttctccgtcatcaacttcttcagcttcttcaactggctctgcgtggccctggccatcatcggcatgatctggctgcgccacagaaagcctgagcttgagcggcccatcaaggtgaacctggccctgcctgtgttcttcatcctggcctgcctcttcctgatcgccgtctccttctggaagacacccgtggagtgtggcatcggcttcaccatcatcctcagcgggctgcccgtctacttcttcggggtctggtggaaaaacaagcccaagtggctcctccagggcatcttctccacgaccgtcctgtgtcagaagctcatgcaggtggtcccccaggagacatagccaggaggccgagtggctgccggaggagcatgcgcagaggccagttaaagtagatcacctcctcgaacccactccggttccccgcaacccacagctcagctgcccatcccagtccctcgccgtccctcccaggtcgggcagtggaggctgctgtgaaaactctggtacgaatctcatccctcaactgagggccagggacccaggtgtgcctgtgctcctgcccaggagcagcttttggtctccttgggccctttttcccttccctcctttgtttacttatatatatattttttttaaacttaaattttgggtcaacttgacaccactaagatgattttttaaggagctgggggaaggcaggagccttcctttctcctgccccaagggcccagaccctgggcaaacagagctactgagacttggaacctcattgctaccacagacttgcactgaagccggacagctgcccagacacatgggcttgtgacattcgtgaaaaccaaccctgtgggcttatgtctctgccttagggtttgcagagtggaaactcagccgtagggtggcactgggagggggtgggggatctgggcaaggtgggtgattcctcccaggaggtgcttgaggccccgatggactcctgaccataatcctagccccgagacaccatcctgagccagggaacagccccagggttggggggtgccggcatctcccctagctcaccaggcctggcctctgggcagtgtggcctcttggctatttctgtgtccagttttggaggctgagttctggttcatgcagacaaagccctgtccttcagtcttctagaaacagagacaagaaaggcagacacaccgcggccaggcacccatgtgggcgcccaccctgggctccacacagcagtgtcccctgccccagaggtcgcagctaccctcagcctccaatgcattggcctctgtaccgcccggcagccccttctggccggtgctgggttcccactcccggcctaggcacctccccgctctccctgtcacgctcatgtcctgtcctggtcctgatgcccgttgtctaggagacagagccaagcactgctcacgtctctgccgcctgcgtttggaggcccctgggctctcacccagtccccacccgcctgcagagagggaactagggcaccccttgtttctgttgttcccgtgaatttttttcgctatgggaggcagccgaggcctggccaatgcggcccactttcctgagctgtcgctgcctccatggcagcagccagggacccccagaacaagaagaccccgcaggatccctcctgagctcggggggctctgccttctcaggccccgggcttcccttctccccagccagaggtggagccaagtggtccagcgtcactccagtgctcagctgtggctggaggagctggcctgtggcacagccctgagtgtcccaagccgggagccaacgaagccggacacggcttcactgaccagcggctgctcaagccgcaagctctcagcaagtgcccagtggagcctgccgcccccgcctgggcaccgggaccccctcaccatccagtgggcccggagaaacctgatgaacagtttggggactcaggaccagatgtccgtctctcttgcttgaggaatgaagacctttattcacccctgccccgttgcttcccgctgcacatggacagacttcacagcgtctgctcataggacctgcatccttcctggggacgaattccactcgtccaagggacagcccacggtctggaggccgaggaccaccagcaggcaggtggactgactgtgttgggcaagacctcttccctctgggcctgttctcttggctgcaaataaggacagcagctggtgccccacctgcctggtgcattgctgtgtgaatccaggaggcagtggacatcgtaggcagccacggccccgggtccaggagaagtgctccctggaggcacgcaccactgcttcccactggggccggcggggcccacgcacgacgtcagcctcttaccttcccgcctcggctaggggtcctcgggatgccgttctgttccaacctcctgctctgggacgtggacatgcctcaaggatacagggagccggcggcctctcgacggcacgcacttgcctgttggctgctgcggctgtgggcgagcatgggggctgccagcgtctgttgtggaaagtagctgctagtgaaatggctggggccgctggggtccgtcttcacactgcgcaggtctcttctgggcgtctgagctggggtgggagctcctccgcagaaggttggtggggggtccagtctgtgatccttggtgctgtgtgccccactccagcctggggaccccacttcagaaggtaggggccgtgtcccgcggtgctgactgaggcctgcttccccctccccctcctgctgtgctggaattccacagggaccagggccaccgcaggggactgtctcagaagacttgatttttccgtccctttttctccacactccactgacaaacgtccccagcggtttccacttgtgggcttcaggtgttttcaagcacaacccaccacaacaagcaagtgcattttcagtcgttgtgcttttttgttttgtgctaacgtcttactaatttaaagatgctgtcggcaccatgtttatttatttccagtggtcatgctcagccttgctgctctgcgtggcgcaggtgccatgcctgctccctgtctgtgtcccagccacgcagggccatccactgtgacgtcggccgaccaggctggacaccctctgccgagtaatgacgtgtgtggctgggaccttctttattctgtgttaatggctaacctgttacactgggctgggttgggtagggtgttctggcttttttgtggggtttttatttttaaagaaacactcaatcatccta

SEQ ID NO: 1112 - DNA, 7787 bp, Homo sapiens
gagacaaaggctgccgtcgggacgggcgagttagggacttgggtttgggcgaacaaaaggtgagaaggacaagaagggaccgggcgatggcagcaggggagccccgcgggcgcgcgtcctcgggagtggcgccgtgacacgcatggtttccccggacccgcggcggcgctgacttccgcgagtcggagcggcactcggcgagtccgggactgcgctggaacaatggataacttcttcaccgagggaacacgggtctggctgagagaaaatggccagcattttccaagtactgtaaattcctgtgcagaaggcatcgtcgtcttccggacagactatggtcaggtattcacttacaagcagagcacaattacccaccagaaggtgactgctatgcaccccacgaacgaggagggcgtggatgacatggcgtccttgacagagctccatggcggctccatcatgtataacttattccagcggtataagagaaatcaaatatatacctacatcggctccatcctggcctccgtgaacccctaccagcccatcgccgggctgtacgagcctgccaccatggagcagtacagccggcgccacctgggcgagctgcccccgcacatcttcgccatcgccaacgagtgctaccgctgcctgtggaagcgctacgacaaccagtgcatcctcatcagtggtgaaagtggggcaggtaaaaccgaaagcactaaattgatcctcaagtttctgtcagtcatcagtcaacagtctttggaattgtccttaaaggagaagacatcctgtgttgaacgagctattcttgaaagcagccccatcatggaagctttcggcaatgcgaagaccgtgtacaacaacaactctagtcgctttgggaagtttgttcagctgaacatctgtcagaaaggaaatattcagggcgggagaattgtagattatttattagaaaaaaaccgagtagtaaggcaaaatcccggggaaaggaattatcacatattttatgcactgctggcagggctggaacatgaagaaagagaagaattttatttatctacgccagaaaactaccactacttgaatcagtctggatgtgtagaagacaagacaatcagtgaccaggaatcctttagggaagttattacggcaatggacgtgatgcagttcagcaaggaggaagttcgggaagtgtcgaggctgcttgctggtatactgcatcttgggaacatagaatttatcactgctggtggggcacaggtttccttcaaaacagctttgggcagatctgcggagttacttgggctggacccaacacagctcacagatgctttgacccagagatcaatgttcctcaggggagaagagatcctcacgcctctcaatgttcaacaggcagtagacagcagggactccctggccatggctctgtatgcgtgctgctttgagtgggtaatcaagaagatcaacagcaggatcaaaggcaatgaggacttcaagtctattggcatcctcgacatctttggatttgaaaactttgaggttaatcactttgaacagttcaatataaactatgcaaacgagaaacttcaggagtacttcaacaagcatattttttctttagaacaactagaatatagccgggaaggattagtgtgggaagatattgactggatagacaatggagaatgcctggacttgattgagaagaaacttggcctcctagcccttatcaatgaagaaagccattttcctcaagccacagacagcaccttattggagaagctacacagtcagcatgcgaataaccacttttatgtgaagcccagagttgcagttaacaattttggagtgaagcactatgctggagaggtgcaatatgatgtccgaggtatcttggagaagaacagagatacatttcgagatgaccttctcaatttgctaagagaaagccgatttgactttatctacgatctttttgaacatgtttcaagccgcaacaaccaggataccttgaaatgtggaagcaaacatcggcggcctacagtcagctcacagttcaaggactcactgcattccttaatggcaacgctaagctcctctaatcctttctttgttcgctgtatcaagccaaacatgcagaagatgccagaccagtttgaccaggcggttgtgctgaaccagctgcggtactcagggatgctggagactgtgagaatccgcaaagctgggtatgcggtccgaagaccctttcaggacttttacaaaaggtataaagtgctgatgaggaatctggctctgcctgaggacgtccgagggaagtgcacgagcctgctgcagctctatgatgcctccaacagcgagtggcagctggggaagaccaaggtctttcttcgagaatccttggaacagaaactggagaagcggagggaagaggaagtgagccacgcggccatggtgattcgggcccatgtcttgggcttcttagcacgaaaacaatacagaaaggtcctttattgtgtggtgataatacagaagaattacagagcattccttctgaggaggagatttttgcacctgaaaaaggcagccatagttttccagaagcaactcagaggtcagattgctcggagagtttacagacaattgctggcagagaaaagggagcaagaagaaaagaagaaacaggaagaggaagaaaagaagaaacgggaggaagaagaaagagaaagagagagagagcgaagagaagccgagctccgcgcccagcaggaagaagaaacgaggaagcagcaagaactcgaagccttgcagaagagccagaaggaagctgaactgacccgtgaactggagaaacagaaggaaaataagcaggtggaagagatcctccgtctggagaaagaaatcgaggacctgcagcgcatgaaggagcagcaggagctgtcgctgaccgaggcttccctgcagaagctgcaggagcggcgggaccaggagctccgcaggctggaggaggaagcgtgcagggcggcccaggagttcctcgagtccctcaatttcgacgagatcgacgagtgtgtccggaatatcgagcggtccctgtcggtgggaagcgaattttccagcgagctggctgagagcgcatgcgaggagaagcccaacttcaacttcagccagccctacccagaggaggaggtcgatgagggcttcgaagccgacgacgacgccttcaaggactcccccaaccccagcgagcacggccactcagaccagcgaacaagtggcatccggaccagcgatgactcttcagaggaggacccatacatgaacgacacggtggtgcccaccagccccagtgcggacagcacggtgctgctcgccccatcagtgcaggactccgggagcctacacaactcctccagcggcgagtccacctactgcatgccccagaacgctggggacttgccctccccagacggcgactacgactacgaccaggatgactatgaggacggtgccatcacttccggcagcagcgtgaccttctccaactcctacggcagccagtggtcccccgactaccgctgctctgtggggacctacaacagctcgggtgcctaccggttcagctctgagggggcgcagtcctcgtttgaagatagtgaagaggactttgattccaggtttgatacagatgatgagctttcataccggcgtgactctgtgtacagctgtgtcactctgccgtatttccacagctttctgtacatgaaaggtggcctgatgaactcttggaaacgccgctggtgcgtcctcaaggatgaaaccttcttgtggttccgctccaagcaggaggccctcaagcaaggctggctccacaaaaaaggggggggctcctccacgctgtccaggagaaattggaagaagcgctggtttgtcctccgccagtccaagctgatgtactttgaaaacgacagcgaggagaagctcaagggcaccgtagaagtgcgaacggcaaaagagatcatagataacaccaccaaggagaatgggatcgacatcattatggccgataggactttccacctgattgcagagtccccagaagatgccagccagtggttcagcgtgctgagtcaggtccacgcgtccacggaccaggagatccaggagatgcatgatgagcaggcaaacccacagaatgctgtgggcaccttggatgtggggctgattgattctgtgtgtgcctctgacagccctgatagacccaactcgtttgtgatcatcacggccaaccgggtgctgcactgcaacgccgacacgccggaggagatgcaccactggataaccctgctgcagaggtccaaaggggacaccagagtggagggccaggaattcatcgtgagaggatggttgcacaaagaggtgaagaacagtccgaagatgtcttcactgaaactgaagaaacggtggtttgtactcacccacaattccctggattactacaagagttcagagaagaacgcgctcaaactggggaccctggtcctcaacagcctctgctctgtcgtccccccagatgagaagatattcaaagagacaggctactggaacgtcaccgtgtacgggcgcaagcactgttaccggctctacaccaagctgctcaacgaggccacccggtggtccagtgccattcaaaacgtgactgacaccaaggccccgatcgacacccccacccagcagctgattcaagatatcaaggagaactgcctgaactcggatgtggtggaacagatttacaagcggaacccgatccttcgatacacccatcaccccttgcactccccgctcctgccccttccgtatggggacataaatctcaacttgctcaaagacaaaggctataccacccttcaggatgaggccatcaagatattcaattccctgcagcaactggagtccatgtctgacccaattccaataatccagggcatcctacagacagggcatgacctgcgacctctgcgggacgagctgtactgccagcttatcaaacagaccaacaaagtgccccaccccggcagtgtgggcaacctgtacagctggcagatcctgacatgcctgagctgcaccttcctgccgagtcgagggattctcaagtatctcaagttccatctgaaaaggatacgggaacagtttccaggaaccgagatggaaaaatacgctctcttcacttacgaatctcttaagaaaaccaaatgccgagagtttgtgccttcccgagatgaaatagaagctctgatccacaggcaggaaatgacatccacggtctattgccatggcggcggctcctgcaagatcaccatcaactcccacaccactgctggggaggtggtggagaagctgatccgaggcctggccatggaggacagcaggaacatgtttgctttgtttgaatacaacggccacgtcgacaaagccattgaaagtcgaaccgtcgtagctgatgtcttagccaagtttgaaaagctggctgccacatccgaggttggggacctgccatggaaattctacttcaaactttactgcttcctggacacagacaacgtgccaaaagacagtgtggagtttgcatttatgtttgaacaggcccacgaagcggttatccatggccaccatccagccccggaagaaaacctccaggttcttgctgccctgcgactccagtatctgcagggggattatactctgcacgctgccatcccacctctcgaagaggtttattccctgcagagactcaaggcccgcatcagccagtcaaccaaaaccttcaccccttgtgaacggctggagaagaggcggacgagcttcctagaggggaccctgaggcggagcttccggacaggatccgtggtccggcagaaggtcgaggaggagcagatgctggacatgtggattaaggaagaagtctcctctgctcgagccagtatcattgacaagtggaggaaatttcagggaatgaaccaggaacaggccatggccaagtacatggccttgatcaaggagtggcctggctatggctcgacgctgtttgatgtggagtgcaaggaaggtggcttccctcaggaactctggttgggtgtcagcgcggacgccgtctccgtctacaagcgtggagagggaagaccactggaagtcttccagtatgaacacatcctctcttttggggcacccctggcgaatacgtataagatcgtggtcgatgagagggagctgctctttgaaaccagtgaggtggtggatgtggccaagctcatgaaagcctacatcagcatgatcgtgaagaagcgctacagcacgacacgctccgccagcagccagggcagctccaggtgaaggcgggacagagcccacctgtctttgctacctgaacgcaccaccctctggcctaggctggctccagtgtgccatgcccagccaaaacaaacacagagctgcccaggctttctggaagcttctggtctgagggaggtgtctccgaggatccttttgcctgccgccttcattgatcctgtattaagctgtcaactttaacagtctgcacagtttccaaagctttactactcttagaggacacatgccttaaaaaaggaggggaggaaccacgctgccaccaaagcagccggaagtgccttaacttgtggaaccaacactaatcgaccgtaactgtgctactgaagggaactgcctttcccccttctgggggagacttaacagagcgtggaaggggggcattctctgtcaatgatgcactaacctcccaacctgatttccccgaatctgagggaaggtgagggagtgggaagggggatggagagctcgaggggacagtgtgtttgagctggagtgctgcgggcagcctttctcatggaatgacatgaatcaacttttttctttgtttcatcttttaagtgtacgtgcttgcctgttcgtgcatgtgttcataaactcaacactttaatcatggtttcatgagcattaaaaagcaaagggaaaaaggatgtgtaatggtgtacacagtctgtatattttaataatgcagagctatagtctcaattgttactttataaggtggttttattaacaaacccaaatcctggattttcctgtctttgctgtattttgaaaaacacgtgttgactccattgttttacatgtagcaaagtctgccatctgtgtctgctgtattataaacagataagcagcctacaagataactgtatttataaaccactcttcaacagctggctccagtgctggttttagaacaagaatgaagtcattttggagtctttcatgtctaaaagatttaagttaaaaacaaagtgttacttggaaggttagcttctatcattctggatagattacagatataataaccatgttgactatgggggagagacgctgcattccagaaacgtcttaacacttgagtgaatcttcaaaggaccctgacattaaatgctgaggctttaatacacacatattttatcccaagtttataatggtggtctgaacaaggcacctgtaaataaatcagcatttatgaccagaagaaaaataatctggtcttggactttttatttttatatggaaaagttttaaggacttgggccaactaagtctacccacacgaaaaaagaaatttgccttgtccctttgtgtacaaccatgcaaaactgtttgttggctcacagaagttctgacaataaaagatactagct

SEQ ID NO: 1113 - DNA, 1682 bp, Homo sapiens; identical to SEQ ID NO: 708

SEQ ID NO: 1114 - DNA, 2390 bp, Homo sapiens
gtgctggccgcggtaaaagtggtagcagcggaggcgagcggagggtttcccgcggcggagtctcactctgctgcctaggctgagtgcagtggtgtgatcgaggcgcactgcagccttgacctcctgagctcaagcgatcctcacctcggcctaccgagtagctgggactacaggcacgcgccactacactcggatttctgacagtcagacttgtccacaagaactcaactggcaaggctgcttttctgtgctaaaactggggagctagtgggcaccatgaagatcttctgcagtcgggccaatccgaccacggggtctgtggagtggctggaggaggatgaacactatgattaccaccaggagattgcaaggtcatcttatgcagatatgctacatgacaaagacagaaatgtaaaatactaccaaggtatccgggctgccgtgagcagggtgaaggacagaggacagaaggccttggttctcgacattggcactggcacgggactcttgtcaatgatggcggtcacagcaggtgccgacttctgctatgccatcgaggttttcaagcctatggctgatgctgctgtgaagattgtggagaaaaatggctttagtgataagattaaggttatcaacaagcattccaccgaggtgactgtaggtccagagggtgacatgccatgccgtgccaacatcctggtcacagagttgtttgacacagagctgatcggggagggggcgctgccctcctatgagcacgcacacaggcatctcgtggaggaaaattgtgaggccgtgccccacagagccaccgtctatgcacagctggtggagtccgggaggatgtggtcgtggaacaagctatttcccatccacgtgcagaccagcctcggagagcaggtcatcgtccctcccgttgacgtggagagctgccctggcgcaccctctgtctgtgacattcagctgaaccaggtgtcaccagccgactttacagtcctcagcgatgtgctgcccatgttcagcatagacttcagcaagcaagtcagtagctcagcagcctgccatagcaggcggtttgaacctctgacatctggccgagctcaggtggttctctcgtggtgggacattgaaatggaccctgaggggaagatcaagtgcaccatggcccccttctgggcacactcagacccagaggagatgcagtggcgggaccactggatgcagtgtgtgtacttcctgccacaagaggagcctgtggtgcagggctcagcgctctatctggtagcccaccacgatgactactgcgtatggtacagcctgcagaggaccagccctgaaaagaatgagagagtccgccagatgcgccccgtgtgtgactgccaggctcacctgctctggaaccggcctcggtttggagagatcaatgaccaggacagaactgatcggtacgtccaggctctgaggaccgtgctgaagccagacagcgtgtgcctgtgtgtcagcgatggcagcctgctctccgtgctggcccatcacctgggggtggagcaggtgtttacagtcgagagttcagcagcttctcacaaactgttgagaaaaatcttcaaggctaaccacttggaagataaaattaacatcatagagaaacggccggaattattaacaaatgaggacctacagggcagaaaggtctctctcctcctgggcgagccgttcttcactaccagcctgctgccgtggcacaacctctacttctggtacgtgcggaccgctgtggaccagcacctggggccaggtgccatggtgatgccccaggcagcctcgctgcacgctgtggttgtggagttcagggacctgtggcggatccggagcccctgtggtgactgcgaaggcttcgacgtgcacatcatggacgacatgattaagcgtgccctggacttcagggagagcagggaagctgagccccacccgctgtgggagtacccatgccgcagcctctccgagccctggcagatcctgacctttgacttccagcagccggtgcccctgcagcccctgtgtgccgagggcaccgtggagctcagaaggcccgggcagagccacgcagcggtgctatggatggagtaccacctgaccccggagtgcacgctcagcactggcctcctggagcctgcagaccccgaggggggctgctgctggaacccccactgcaagcaggccgtctacttcttcagccctgccccagatcccagagcactgctgggtggcccacggactgtcagctatgcagtggagtttcaccccgacacaggcgacatcatcatggagttcaggcatgcagataccccagactgaccactcttgagcaataaagtggcctgagggctggg

SEQ ID NO: 1115 - DNA, 2299 bp, Homo sapiens
cctaccggtccatagtgtcagagtggtgaacccctgcagccagcaggcctcctgaaaaaaaagtccatgggtgacagaagattcattgacttccaattccaagattcaaattcaagcctcagacccaggttgggcaatgctactgccaataatacttgcattgttgatgattccttcaagtataatctcaatggtgctgtctacagtgttgtattcatcttgggtctgataaccaacagtgtctctctgtttgtcttctgtttccgcatgaaaatgagaagtgagactgctatttttatcaccaatctagctgtctctgatttgctttttgtctgtacactaccttttaaaatattttacaacttcaaccgccactggccttttggtgacaccctctgcaagatctctggaactgcattccttaccaacatctatgggagcatgctctttctcacctgtattagtgtggatcgtttcctggccattgtctatccttttcgatctcgtactattaggactaggaggaattctgccattgtgtgtgctggtgtctggatcctagtcctcagtggcggtatttcagcctctttgttttccaccactaatgtcaacaatgcaaccaccacctgctttgaaggcttctccaaacgtgtctggaagacttatttatccaagatcacaatatttattgaagttgttgggtttatcattcctctaatattgaatgtctcttgctcttctgtggtgctgagaactcttcgcaagcctgctactctgtctcaaattgggaccaataagaaaaaagtactgaaaatgatcacagtacatatggcagtctttgtggtatgctttgtaccctacaactctgtcctcttcttgtatgccctggtgcgctcccaagctattactaattgctttttggaaagatttgcaaagatcatgtacccaatcaccttgtgccttgcaactctgaactgttgttttgaccctttcatctattacttcacccttgaatcctttcagaagtccttctacatcaatgcccacatcagaatggagtccctgtttaagactgaaacacctttgaccacaaagccttcccttccagctattcaagaggaagtgagtgatcaaacaacaaataatggtggtgaattaatgctagaatccaccttttaggtatgagaaatgtgttcaggtccagatatggtttctcctataatttttcctatgctataaactaaagatttgaagctaatgatactgagaataatgcaccaaatccagtcagatacatttgtttgaaggtatactgtagagtttttattgctgttttgttcagtaattataggtcaaatctaattacaacaaccaagatggattgccaaactcttctgcttggttggaatttcattgtatcgcattatccaggtggctagtggcatttgataatatagagatgactttgaaactttcaaaaaggtatttctattccaatgatatttggtaattaggttgggcctataaatatagaacaaattcagggatttttaaaaaattgtgttactactgatatatgctagttttattttatttttttggactgtcattgagtttattttagcacaagaatatttttagcctaacattattaataagaaatgtgtcaaatttttaacattggtaaaatatgttatgtgcattttgaaaacagaaaacaaattgcgttggcatgtacgtgggtgggaagaaaaagaaaattaacaggatttacacaattataatcaccagcagtgtgagtttaaaaaacttcgttgtttttacaccaaattaaaattttcatgtcaaacttcaaagccagaaagctgctaaatacgtgtctggcaggtaaaagctggaaaattacttaaaacaggaaagtgtcaataaaaaaacttgagcaacaccaacatattttttcttaaaatgtcacgttatcttcattttgggaaactaggttctataaaatatttatcctccctgttatactttggagcacagcacagccagaaaggggctgcatttgtgcccaggtcaggagcaaattgaaaaaaaaaataaagtaatactaaaaaatcaaactataaacccaaaacatttattaaaacctgaattaatcctttttggagggaggagtagagatatataacctgaaaatacttattctttcttatcgaattttggagcctaatatagccaggagctgctgaatttgtgcccctggattggaaccaaataaaaaaaaaaaaaaaaaattcct

SEQ ID NO: 1116 - DNA, 2384 bp, Homo sapiens
atctgccaccgcagtctggttggagctgttgtcttgtatgctcagcgaggcccggagagacccgggagagagctaggccgagtccaccgcccgagtctgctgcccgagcccgcgttacgcacaaagccgccgatccccggcctggggtgagcagagcgaccaccgcccgggagcagcgcggcgagacgcacggtgcgccctatgcccccgcgcccccaccgcccccgccgcggcagccgaagcgcagcgagagaacgcgccaccgcggggcccgggtgcagctagcgaccctctcgccacctgcgcgcagcccgaggtgagcagtgagcggcgagcgggagggcagcgaggcgttcgcgggccccctcctgctgcccgggcccggcccgctcatggcggccatccgcaagaagctggtggtggtgggcgacggcgcgtgtggcaagacgtgcctgctgatcgtgttcagtaaggacgagttccccgaggtgtacgtgcccaccgtcttcgagaactatgtggccgacattgaggtggacggcaagcaggtggagctggcgctgtgggacacggcgggccaggaggactacgaccgcctgcggccgctctcctacccggacaccgacgtcattctcatgtgcttctcggtggacagcccggactcgctggagaacatccccgagaagtgggtccccgaggtgaagcacttctgtcccaatgtgcccatcatcctggtggccaacaaaaaagacctgcgcagcgacgagcatgtccgcacagagctggcccgcatgaagcaggaacccgtgcgcacggatgacggccgcgccatggccgtgcgcatccaagcctacgactacctcgagtgctctgccaagaccaaggaaggcgtgcgcgaggtcttcgagacggccacgcgcgccgcgctgcagaagcgctacggctcccagaacggctgcatcaactgctgcaaggtgctatgagggccgcgcccgtcgcgcctgcccctgccggcacggctccccctcctggaccagtcccccgcgagcccggagaaggggagacccgtgtcccacaaggaccccaccggcctgcctggcatctgtctgctgacgcctctggcttgcgccaggacttggcgtgggcaccgggcgcccccatcccagtgtctgtgtgcgtccagctgtgttgcacaggcctgggctccccactgagtgccaagggtcccctgagcatgcttttctgaagagccgggcctcagagtgtgtggctgtgtgtctgttcgactcccctcgccccattttcaccccacccccgcctctgatccccgggggcgagattggcgcgggagtgtggccgcgccccatcagatgttctcccttcaccagcgggagcttgatatcccttgtctgtaacatagaccccgggtactgcgggaggggagggctgctggggaggatggggggatgttatataaatatagatataattttattttcggagctaagatggtgttatttaagggtggtgatgggtgagcgctctggcccaggctgggccagactcccgcccaagcatgaacaggacttgaccatctttccaacccctggggaagacatttgcaactgacttggggaggacacagcttcagcacagcctctcctgcgggccagcccgctgcgaaccctccaccagctaccggagggaggagggaggatgcgctgtggggttgtttttgccataagcgaactttgtgcctgtcctagaagtgaaaattgttcagtccaagaaactgatgttatttgatttatttaaaggctaaaatttgtttttttattctttgcacaattgtttcattgtttgacacttaatgcactcgtcatttgcatacgacagtagcattctgaccacacttgtacgctgtaacctcatctacttctgatgtttttaaaaaatgacttttaacaaggagagggaaaagaaacccactaaattttgctttgtttccttgaagaatgtggcaacactgttttgtgattttatttgtgcaggtcatgcacacagttttgataaagggcagtaacaagtattggggcctattttttttttttccacaaggcattctctaaagctatgtgaaattttctctgcacctctgtacagagaatacacctgcccctgtatatccttttttcccctcccctccctcccagtggtacttctactaaattgttgtcttgttttttattttttaaataaactgacaaatgacaaaatggtgagcttatgatgtttacataaaagttctataagctgtgtatacagttttttatgtaaaatattaaaagactatgatgatgacatttaaaaaaaaaaaaaaaaaa

SEQ ID NO: 1117 - DNA, 709 bp, Homo sapiens
ttcatgccacccttttttagaccatattaagtaacttcctggcattgccatggcatctgtaacctgtcatggcgctggcaggagtgtggcagtgaggacgaccaagatcactctggttgccatcttggttttggtgggttttgggctgccttctttaccgcaacctgttttatcagcaaggtctttacaacctgtatcttgtgatgacctcctatctcatcctattacttagaatgccttcaccattggcattggcagtgcagcccagtaggtctcagcctcattttaccccgcccctactcaagatgaagttgctctggttcaaacgcctctgataccatgagattttgaatctcgatactttcttctgggaacttgttcttcttttacttcttcattctcacatcccagcccctgattttctctgtttcctctttctgaaacttctagtagacactgtacttcctggcacagtatcctccctcaatttttcacttatatactcttttagtgtcttcgtattctaggaattttttttttacttaatcctctagctcttctacaaaatgttctgttttgttaatcatgtttaacataattttgatccttttaaatgtattgagacctatcttggtgaatgttccatgtgcaattgaaaagaatatgtactgtgctgttgctgggcggagtgttctataaatgtcactta

SEQ ID NO: 1118 - DNA, 805 bp, Homo sapiens
ggttcttgggccaatttcttgctgactcagccccactctgtgtcggagtctccggggaagacggtaaccatctcctgcaccggcaacagaggcagcattgccgccaactatgtgcagtggtaccagcagcgcccgggcagtgcccccaccactgtgatctatgaagataaccaaagaccctctggggtccctgatcggttctctggctccatcgacagctcctccaactcagcctccctcactatctctggactgaagcctgaggacgaggctgactactactgtcagtcttatgagagcagcaatcattgggtgttcggcggagggaccaagctgaccgtcctaggtcagcccaaggctgccccctcggtcactctgttcccaccctcctctgaggagcttcaagccaacaaggccacactggtgtgtctcataagtgacttctacccgggagccgtgacagtggcctggaaggcagatagcagccccgtcaaggcgggagtggagaccaccacaccctccaaacaaagcaacaacaagtacgcggccagcagctacctgagcctgacgcctgagcagtggaagtcccacaaaagctacagctggcaagtcacgcatgaagggagcaccgtggagaaacagtggcccctacagattgttcataggttctcatccctcaccccccaccacgggagactagagctgcaggatcccaggggaggggtctctcctcccaccccaaggcatcaagcccttctccctgcactcaataaaccctcaataaatattctcattgtcaatcaga

SEQ ID NO: 1119 - DNA, 675 bp, Homo sapiens
ggttttctttttgatgcttgctataattttggtctctttagttggactccggtgctattttcctcagtatatttgatggtctaccacaggggtccccaacccctgtagccacagaccagtgtgagtccgtggcctgttaggaactggcctgcacagcaggtgagcagcagttgagtgagcgaaactccatctatgtttacagctgctccccgttgctcacattaccacctgagctctgcctcctgtcggattagcagccttgttagattctcatatgggagcatgaacccaattgtgaattgcgcgtgtgtgggatctaggttgcacaccccttgtaagaatctaatgcctgatgatctgaggtggaacagtttcatcctgaaaccatacccccatcccaatctgcggaaaaattgtcttccatgaaaccaaccggtccctggtgccaaaaaggttggggaccactggcttacaagatactctattcccatctttagttctcttgccccaaacatagaattaactactctactagctgtgtttgttcttttggtgtaaaaaaatgatttgaattcaaaacatggggttctgtcaaaatagcacagtgaatttgtgaattgatcatgtctctgctccaaataaagaaacaaactacaagaagagaaaaaaacaaaa

SEQ ID NO: 1120 - DNA, 733 bp, Homo sapiens
  modified_base (701)..(701): a, c, t or g
  modified_base (709)..(709): a, c, t or g
tctttcatttcaacgttgaggtctagtgcacacagaacttgaaacaccgcactctgtcaacagcaataatccactcagtactgtgggatggatgggttaatggatgagaaaacggcaccaagactgactttgggtatttggtatatttaccgtggttacactctggactggttgattcttctgcatgtgatatagaaaaaagtgctgcatgcggtgaacctgtcagtctgggactgggggtgagttgttgttatgagtttggggtggtgtgaggaaagtgaatgctgcttagctcatctgtagctcattgcaatgaattcagtaagaatggagtacagggattatctgtgtagcataggcatgcaatgtttgaccaagctcctacccccttctccctctcccttcccctgactgttccacccaggaggaggaaacttcagatagccgtgctcacagttttttattttaaaggaatttggctggggagctgaacagggctccctgtgatctgaagaaagcttttggtgcttgtcctcacaaccacctcagtcctccctccctgtcctcccctgtctcctttcctcctcctgggttcatgttgtaataaaagaagattgttggtgtgtaattaatttgttcaaaagaaaaaaaaaagcaaaacaagaaacttggttccaactgaagcctatttaaatttaatntaataatnccccccctggttaaaaaataaaac

SEQ ID NO: 1121 - DNA, 1053 bp, Homo sapiens
  modified_base (6)..(6): a, c, t or g
  modified_base (12)..(12): a, c, t or g
  modified_base (38)..(38): a, c, t or g
  modified_base (41)..(41): a, c, t or g
  modified_base (60)..(60): a, c, t or g
  modified_base (72)..(72): a, c, t or g
  modified_base (96)..(96): a, c, t or g
  modified_base (438)..(438): a, c, t or g
  modified_base (445)..(445): a, c, t or g
  modified_base (455)..(455): a, c, t or g
  modified_base (463)..(463): a, c, t or g
  modified_base (473)..(473): a, c, t or g
acttgncaatgnctatatttgtttacatctgagttagnagncttgcccaatgagataagnctttttcccagnacttcacacttactcaaaaaaagnacattggaaaacgcctattttaaatatgttcaaagaaccaaaggtaaacaacgtctcaccaaatagagaaaatcaataatgagatagaaattacggaaggaaaagccaaaaaggaatgaacagattctcagagacctgtgggacactgtcagatgtaccaacatagggcatgatgaaagtctcatgtcaaccataattttcacccatagccatacatgcccaagagaattgaaaacatgtaatacttgaatgtgaatgttcatagtggcataatagctaaaaaaaaaggcccagatatccatcatctgatgatgagtgaacagtgtggttttgcatacagtnggcttgnttcaggcatnaaaagggntgaagtttgntacagactacaacgtgaatggatgagccttaagaatatcatgctaacaaagaagctaaaacacaatatggttccacttacatgcaatgtccaaaataagtaaatccatagagactgaaaatacatcagtgattgctaggagctggggagagggaagaatagtgagtgcatgctaatgagtctgacatttacttttagaaagatgaatgtattctggaattggatagcgctgattatacgaccttgtgaatatacaggatccactgaactgcactttaaaagggtgaatattgtgtgaatcatatctcaatttaaaaagatatatataaagttccctgggtgaatactggtttccctcctcccttcagtatatgtgaaatgtagtgaaatttatactggttctgacaggtattttaatttgaaatgattttttcctccatccttgggaagttgataatttgtccttttatgtattctgaaaacggcaaaaactggttccggaaagtcaggagttaccaaaatactataatcggaaagagtggaaagtctccccctttccaatggttggtctttcacacccg

SEQ ID NO: 1122 - DNA, 1948 bp, Homo sapiens
atgggcccctctggctcccctctgctgctacactgccctgcaccacctccactcagcttcagtgtgttcatccgcctgtcccacgtcccctcggcccccaggagcacagctggtggccctggctcctcgcagcccatcttgttccttctggagcaccagcctcagaggccttcctgtgcagggtccactcggccagccctgggaccctcctggtctcaagcacacacattctccctgcagccagacctgcccctgcctgtgagttcagacctgagccttggaacgccttcccttctccatcccagctcgcctttgccagctgctcagcaggatgaactcacactcccctccctgcaccatgaaaaccaccagaagaaaagggaacttcaggaagtaagtggtgccgccagtttcaatcctgttcttagtgtttgcagcgtggagttcacaaccctggggacctgggggccgagctgtgatttcctaggaagacaaatggcagctgacagcgtgggcaaggctgcccacatgtacctcgccacaacaggaagggctgagacccccacctcgagccagggcagagcagtcgcaggtgagcagggctcagtggaagatgggcaagcagggggcagctcctggagctcagggcaccagggcagtgtagccacagcttccaccaagggcccatcggtcttccccctggcgccctgctccaggagcacctctgggggcacagcggccctgggctgcctggtcaaggactacttccccgaaccggtgacggtgtcgtggaactcaggcgccctgaccagcggcgtgcacaccttcccggctgtcctacagtcctcaggactctactccctcagcagcgtggtgaccgtgccctccagcagcttgggcacccagacctacacctgcaacgtgaatcacaagcccagcaacaccaaggtggacaagagagttgagctcaaaaccccacttggtgacacaactcacacatgcccacggtgcccagagcccaaatcttgtgacacacctcccccgtgcccacggtgcccagagcccaaatcttgtgacacacctcccccatgcccacggtgcccagagcccaaatcttgtgacacacctcccccatgcccacggtgcccagcacctgaactcctgggaggaccgtcagtcttcctcttccccccaaaacccaaggatacccttatgatttcccggacccctgaggtcacgtgcgtggtggtggacgtgagccacgaagaccccgaggtccagttcaagtggtacgtggacggcgtggaggtgcataatgccaagacaaagccgcgggaggagcagttcaacagcacgttccgtgtggtcagcgtcctcaccgtcctgcaccaggactggctgaacggcaaggagtacaagtgcaaggtctccaacaaagccctcccagcccccatcgagaaaaccatctccaaaaccaaaggacagccccgagaaccacaggtgtacaccctgcccccatcccgggaggagatgaccaagaaccaggtcagcctgacctgcctggtcaaaggcttctaccccagcgacatcgccgtggagtgggagagcagcgggcagccggagaacaactacaacaccacgcctcccatgctggactccgacggctccttcttcctctacagcaagctcaccgtggacaagagcaggtggcagcaggggaacatcttctcatgctccgtgatgcatgaggctctgcacaaccgcttcacgcagaagagcctctccctgtctccgggtaaatgagtgcgacggccggcaagcccccgctccccgggctctcggggtcgcgcgaggatgcttggcacgtaccccgtgtacatacttcccgggcacccagcatggaaataaagcacccagcgctgccctgggcccctgcgagactgtgatg

SEQ ID NO: 1123 - DNA, 1774 bp, Homo sapiens
atttttacatcagcttgtcagaaattatattaaaaacactttggggaaagctaagagcagtgcactgtttagcacagattttgtgagattctatactcttttaatgagcatttcatagggttttttttttgctgtttttttttctttttttgctttgctttactttgccaatcagttacttttataccaaattaacgaagtttctttaaaaacttcctggttaaattgtctgttatcatatagaaaagaatcaaactgaatcactttacatttctctaaagatagttcagtttttaatccatccagagtttgtgaatcagcctgatagatcataagccatttataatttttaaacgttccattgaatgagtatatcatacaaatgttaattccatctcgctcattcagttttacattacttttatgaattttttttctcgcaaagtaaatgcttgatgttattcattcaccatcactctaaggtattttaaatcatacaacaagtaactatcacaagaaccactgtcccaagatccaaagtcagatttttttcccttttcaagttgctagaatgataattcatatagctgtgttgatttttcaggtcagaatttagttcttgctttgttaaatggacatacatgaaagagattggctcctatctaattcatattctctctctctctctctctctttctctgtgtgtgtgtgggggtgtgtgtgtgtgtgtgtgtgtgtgtgtgtgtctctttcctctctgtctaaggggaattggaaaattgctgctgaataatttttcttgaaaaagccaagtgttgatatgatgatatattaatcttatctatgaacagagcttcaccacaggccaagcagtaatgtatacagctggctttttaagctgtttgaacactattgttttcgattaaaaagagtttttgtttgtttttcacttgtatagtaaaagatcatatgaattaaatactcggatattaattttcattcttactaagtggccatgtaaggcattgattttttttaaacttgaacaatgcaagaatctaggaatctcagaaagattttgctgtgtttctataggtaatgaaatcctgtcaattaaggaaaatgctgtgtgtaatttgatttggtggtagcctttatttagagctctctttgatctatgtagcaaaaatacactaaatttctttttaatcttgtactaagtacataatttcacaaaaataccttgggcataaaatacttacaaaactgtgaattaaaatactcaagatactttcaaaatttagtcaaaatgttgattcccagcctttttcctacacgtctatttcaaaagagtatacttttttctgacagccattactgcttagtctgtaatgaaagctttactgcttctatgctgtgctcaagagaaaaccaacaacggaagcgaagacttacttgctccttcacagaattgcagcaaagctctctgctgggcaatggtgacaggaaagtgtgtaattgacttgttgaagataatcatgagaccatcttaacattacttgccttataagttagaaatagtatggatatcactctttgtaaataataatttttgtaaatgttttttgttcataattttcccaatcacctatttcacaaaatcctgaatatgcaattatttattatgacacgttactgcaactagggctcccattccagaacaaagtttaattctatatgtaagttgttactgaaatgtgatttctttttctgg

SEQ ID NO: 1124 - DNA, 193 bp, Homo sapiens
ccattcttgggaggacacttttgccaatgaactctttccccagctgattagtgtctaaggaatgatccaatactgttgcccttttccttgactattacactgcctggaggatagcagagaagcacagttgtcccattgaattatttgagcaaaaactactgtaaataacttttttgtcttttgtcaaataaaa

SEQ ID NO: 1125 - DNA, 669 bp, Homo sapiens
gaagggagctaacccatcagtgtttttgagaaagctcaccttgtccctgttacctggagtccaaggcttctgccactaagcccggccaagcattcgggtgggacagccgccaccaagccaggtgtctggggtctcagtgtcctggatgactccatctgcaagaccaaggcgagtttctccagggccacgaggcagcgcctggctccggcagctgggcacgtccagggcagaggctgtgcttctggattggggcgtcctcaccatgccccagcccaggcgtctcccccaggccttccttctggagagacaccttattcgtgcctgtctcttaaagcctcaagtttgattgaagaagcagaagttggcatagacacctttgagcattcaagctctcgccgggcctgctgcaggcatttcaaggcatcttagcccatcgtttaatttaggacagaggccacggagaggcaccgctggagcagtacaccgcacaccacagggtggctgcactttttgggtggtggggtggggatgggggcaggtatgatcaatcatccaaaccagggcatttttaagagtaaaaggaggctctactgataacatgctgcaacaacagatgtgactaggaacggccggtgacatggggagggcctatcaccctattcttggggg

SEQ ID NO: 1126 - DNA, 1182 bp, Homo sapiens
atacaggagatacggttaaaaaaaaattcaactgaaaaacacaataacccaaattaaaaactgaatggataggtttaacagcagtttagacacaaagaaaaatttagtgacctaaaatctaaagcaaataaaacaggaaggtatgactcattcaaaggaaaatatttaactgacaaaaacatgcccaaggaagcctagacattggacttagtaaacaaaggctttaaaccgactgtcttaaatgtgctcgaagaactgaaggaagccatggacacagaactacaggaagtcaggaaaatcacagaggaacacaatgaggatatcaacagataggaattatgaaggtgatcaaatggaactagaagagctgaaaataataactgacacttacaaattcactagaggggttcaccggcagatctgagcaggcagaataaagaatcagcaagctggagacacttacaatggaaatgatcctgtgaggagcagaggaaaaaagtggcagagtggacagagccagagggtggtccaccatgaagtggatgagtaaaacattacgggagtcacaggagaggagagcccagagatgaaggctaactcttatgctgcagtgactctccacaagggggccaagaccattcaaaggggaaagcagttttcaacaacgtctgctgggaaaactggatatgcacataccagaaaaagaaggtggagccctgccttgcctcacaaaaatcaactctatcccagcactttgggaggccgaggcgggcggatcatgaggtcaagggatcgagaccatcctggccaacatggtgaaatctcgtctctactaaaaataaaataaaataattagctgggcatggtggtgcaagcctgtagtcccagctacttgggaggctgaggcattgtgctacaacattacatgacttttcatcatttcatcataataacaactctatgaaacggtgcctactatccccatactacagatggagaaaaagaggtcatttgtcaaggggttaggtcatttgtcagagaagcaagcacaggtaaaatctacatctgtatacgggtaatctggctccagagtcctcaattttctttttctttttttttttttgagatggggagtctcgctcagttgcccaggcgcaatcttggttcactgcaacctccgct

SEQ ID NO: 1127 - DNA, 720 bp, Homo sapiens
aaagaatttattcttaaagatattaagatataagaagtcttataaatcagtaaaaaaaagactaattccccattgaaaaattacaagtaaaattctggataatctaaaaaatgctcagcctcatctataatttttgaactgcaaattaaagcaatatgtcacttttaaggtattaaactggcagagacttcagaaattataagtagtggtatgctcataaatgtttaataaccacctctggcgggggtggggggttgttttgtaactttgccaatttctgtggtgtcaatacttctcaccatggtgatttcaaactacgaacatgacatcactgaatacagcagagttaagagatgggcatttgcctcttataagctgttactatctggctccagcacatttccaattcatactctgctgtcaagggtacatcagaatggacatgtccatgtatttctggtatcaggattccgggagcgtggtccatcttgtgcatcattcaattcctccgcccttcacctgcacaccatgtcatcatacgtttttatctttgccaggctgagagatgagaaattatgtgtcagtaggataagttgcatttctctcgttatgagtgaagttgagcatcttctcacatgtttaagaggcatttgtattttcctttctcatcttatcattgcccattttgctaacattctgatttctagaaacttttcagaa

SEQ ID NO: 1128 - DNA, 628 bp, Homo sapiens
ggcacgaggcctcgtgccgcctcgtgccgaagccttagggaagctggcctgagaggggaagcggccctaagggagtgtctaagaacaaaagcgacccattcagagactgtccctgaaacctagtactgccccccggtaatgactccaacttattgatagtgttttatgttcagataatgcccgatgactttgtcatgcagctccaccgattttgagaacgacagcgacttccgtcccagccgtgccaggtgctgcctcagattcaggttatgccgctcaattcgctgcgtatatcgcttgctgattacgtgcagctttcccttcaggcgggattcatacagcggccagccatccgtcatccatatcaccacgtcaaagggtgacagcaggctcataagacgccccagcgtcgccatagtgcgttcaccgaatacgtgcgcaacaaccgtcttccggagactgtcatacgcgtaaaacagccagcgctggcgcgatttagccccgacatagccccactgttcgtccatttccgcgcagacgatgacgtcactgcccggctgtatgcgcgaggttaccgactgcggcctgagttttttaagtgacgtaaaatcgtgttgaggccaacgcc

SEQ ID NO: 1129 - DNA, 866 bp, Homo sapiens
  modified_base (651)..(651): a, c, t or g
  modified_base (695)..(695): a, c, t or g
  modified_base (754)..(754): a, c, t or g
  modified_base (781)..(781): a, c, t or g
  modified_base (800)..(800): a, c, t or g
  modified_base (813)..(813): a, c, t or g
  modified_base (838)..(838): a, c, t or g
  modified_base (853)..(853): a, c, t or g
ggcacgaggctgtcttcattttcatgagtaccttgtagaaaactattaataatgataaataactaaacttctctagattaccttaatttttttgttgttgttctcagtacatctaagagagtagcatataggccatgtgtatgtggtgataaatgaaaatgcaggggtcttacttggttatttaggacttaagattttatctagtcattttcaactgtgattgaacacttccctttaactcccttcagaaactccaagatcatattgtatcccaggtactagaatttctgttcagctgtttataggcctccaccacaagaaattggctccaaacctattcccattacatcatcacccactaatgtcattacaccagaatgaaatctgctttgaggcttgtattgttgttttccttccatttctttcccctcatcatttcctttagaaggaaaagggaaggaaaaaaaaagaaaaaaatcagagacctgtaaacatttaagagtgaattggacatccccacaggctaaacctagagttgtcagctttcattccattctgctgtgatagagtgttctgcccagtatgtatccacatggagcctggaaagtaacaagtctggtcatgtgacaactggctttggtgctttgcttncagcccctcagaattagttcctaatggctcacatagctccctgnccagcatcccgtcactggcacgttaaacctttttcaaataattcctcagaatagagatncttaggagagcactaaatttctccatncttggtgtttaattaaacngtcctggcatttnaatattggccaaatagcgcttaaanattacgatacaggtngagtatccttaat
